(19) United States
(12) Patent Application Publication
(10) Pub. No.: US 2023/0272477 A1
(43) Pub. Date: Aug. 31, 2023

(54) SAMPLE CONTAMINATION DETECTION OF CONTAMINATED FRAGMENTS FOR CANCER CLASSIFICATION

(71) Applicant: GRAIL, LLC, Menlo Park, CA (US)

(72) Inventors: Samuel S. Gross, Sunnyvale, CA (US); Siddhartha Bagaria, San Francisco, CA (US)

(21) Appl. No.: 17/993,597

(22) Filed: Nov. 23, 2022

Related U.S. Application Data
(60) Provisional application No. 63/282,509, filed on Nov. 23, 2021.

(51) Int. Cl. C12Q 1/6886; G16H 50/20; G16B 40/20

(52) U.S. Cl. CPC C12Q 1/6886; G16H 50/20; G16B 40/20; C12Q 2600/156; G01N 2800/7028

(57) ABSTRACT

Methods and systems for detecting contaminated fragments in a biological sample for cancer classification are disclosed. The system identifies multiple SNP site contamination markers and indel site contamination markers. The multiple SNP site contamination markers include at least two SNP sites within a threshold distance, having population haplotype frequency within a range of threshold frequencies, excluding guanine-adenine polymorphisms and/or cytosine-thymine polymorphisms, ensuring Hardy-Weinberg equilibrium, or any combination of the parameters above. The indel site contamination markers include indel sequences that are within a threshold length, having high complexity, having population haplotype frequency within a range of threshold frequencies, ensuring Hardy-Weinberg equilibrium, or any combination of the parameters above. The system identifies contamination markers for which the sample is homozygous. The system estimates the contamination level of the sample by identifying fragments having a haplotype that is different than the homozygous haplotype of the respective contamination marker site.

### CROSS REFERENCE TO RELATED APPLICATIONS

[0001] This application claims the benefit of and priority to U.S. Provisional Application No. 63/282,509 filed on Nov. 23, 2021, which is incorporated by reference in its entirety.

### BACKGROUND

### Field of Art

[0002] Deoxyribonucleic acid (DNA) methylation plays an important role in regulating gene expression. Aberrant DNA methylation has been implicated in many disease processes, including cancer. DNA methylation profiling using methylation sequencing (e.g., whole genome bisulfite sequencing (WGBS)) is increasingly recognized as a valuable diagnostic tool for detection, diagnosis, and/or monitoring of cancer. For example, specific patterns of differentially methylated regions and/or allele specific methylation patterns may be useful as molecular markers for non-invasive diagnostics using circulating cell-free (cf) DNA. However, there remains a need in the art for improved methods of contamination detection of cfDNA fragments not derived from the individual of the sample.

[0003] The present disclosure is directed to addressing the above-referenced challenge. The background description provided herein is for the purpose of generally presenting the context of the disclosure. Unless otherwise indicated herein, the materials described in this section are not prior art to the claims in this application and are not admitted to be prior art, or suggestions of the prior art, by inclusion in this section.

### SUMMARY

[0004] Early detection of a disease state (such as cancer) in subjects is important as it allows for earlier treatment and therefore a greater chance for survival. Sequencing of DNA fragments in cell-free (cf) DNA sample can be used to identify features that can be used for disease classification. For example, in cancer assessment, cell-free DNA based features (such as presence or absence of somatic variant, methylation status, or other genetic aberrations) from a blood sample can provide insight into whether a subject may have cancer, and further insight on what type of cancer the subject may have. Towards that end, this description includes systems and methods for analyzing cell-free DNA (cfDNA) sequencing data for determining a subject's likelihood of having a disease.

[0005] The present disclosure addresses the problems identified above by providing improved systems and methods for sample contamination detection of contaminated fragments for cancer classification. The system identifies one or more contamination markers from a plurality of contamination markers for which a sample has a homozygous haplotype. The system identifies any cfDNA fragment in the sample having a different haplotype at one of the identified contamination markers than the homozygous haplotype of the respective contamination marker as a contaminated cfDNA fragment. The system estimates a contamination level of the sample based on any contaminated cfDNA fragment. The system may implement this contamination detection for both training samples used in training a cancer classifier and may also implement this contamination detection for test samples when deploying the cancer classifier. The contamination markers include multiple single nucleotide polymorphism (SNP) site contamination markers and/or indel site contamination markers. In some examples, the multiple SNP site contamination markers include at least two SNP sites within a threshold distance, having population haplotype frequency within a range of threshold frequencies, excluding guanine-adenine polymorphisms and/or cytosine-thymine polymorphisms, ensuring Hardy-Weinberg equilibrium, or any combination of the parameters above. In some examples, the indel site contamination markers include indel sequences that are within a threshold length, having high complexity, having population haplotype frequency within a range of threshold frequencies, ensuring Hardy-Weinberg equilibrium, or any combination of the parameters above.

[0006] According to a first aspect, a method is disclosed for predicting a presence of cancer in a test sample, the method comprising: obtaining the test sample comprising a plurality of sequence reads for cell-free DNA (cfDNA) fragments in the test sample; identifying one or more contamination markers from a plurality of contamination markers for which the test sample has a homozygous haplotype; for each of the identified one or more contamination markers for which the test sample has a homozygous haplotype, identifying any cfDNA fragments in the test sample having a different haplotype at one of the identified contamination markers than the homozygous haplotype of the respective contamination marker as a contaminated cfDNA fragment; estimating a contamination level based on any identified contaminated cfDNA fragments; and determining whether the contamination level is below a threshold level; and responsive to determining that the contamination level is below the threshold level, performing cancer classification on the sequence reads of the cfDNA fragments in the test sample to generate a cancer prediction.

[0007] The method of the first aspect, wherein the plurality of contamination markers includes multiple single nucleotide polymorphism (multiple SNP) sites.

[0008] The method of the first aspect, wherein the multiple SNP sites are within 10 basepairs (bps).

[0009] The method of the first aspect, wherein the multiple SNP sites have population haplotype frequencies within the range 45%-55%.

[0010] The method of the first aspect, wherein the multiple SNP sites exclude guanine-adenine polymorphisms and cytosine-thymine polymorphisms.

[0011] The method of the first aspect, wherein the haplotypes of each multiple SNP site are in Hardy-Weinberg equilibrium.

[0012] The method of the first aspect, wherein the plurality of contamination markers includes at least 500, at least 1,000, at least 1,500, or at least 2,000 multiple SNP sites.

[0013] The method of the first aspect, wherein the plurality of contamination markers includes multiple SNP sites from Table 1.

[0014] The method of the first aspect, wherein the plurality of contamination markers includes insertion-deletion (indel) sites.

[0015] The method of the first aspect, wherein the indel sites are between 5 bps and 10 bps.

[0016] The method of the first aspect, wherein the indel sites have population haplotype frequencies within the range 45%-55%.

[0017] The method of the first aspect, wherein the haplotypes of each indel site are in Hardy-Weinberg equilibrium.

[0018] The method of the first aspect, wherein the plurality of contamination markers includes at least 500, at least 1,000, at least 1,500, or at least 2,000 indel sites.

[0019] The method of the first aspect, wherein the plurality of contamination markers includes indel sites from Table 3.

[0020] The method of the first aspect, wherein each contamination marker includes a probe designed to target each haplotype of the contamination marker.

[0021] The method of the first aspect, wherein estimating the contamination level is further based on one or more of: a number of identified contaminated cfDNA fragments, sequencing depth of the test sample, a number of cfDNA fragments in the test sample, and a number of contamination markers.

[0022] The method of the first aspect, wherein responsive to determining that the contamination level is above the threshold level, forgoing cancer classification.

[0023] The method of the first aspect, wherein the cancer prediction comprises a binary prediction between cancer and non-cancer.

[0024] The method of the first aspect, wherein the cancer prediction comprises a multiclass cancer prediction between a plurality of cancer types.

[0025] The method of the first aspect, wherein performing the cancer classification further comprises: filtering an initial set of cfDNA fragments of the test sample with p-value filtering to generate the set of anomalous fragments, the filtering comprising removing fragments from the initial set having below a threshold p-value with respect to other fragments to produce the set of anomalous fragments.

[0026] The method of the first aspect, wherein the classification model is a machine-learning model.

[0027] According to a second aspect, a non-transitory computer-readable storage medium is disclosed storing instructions that, when executed by the computer processor, cause the computer processor to perform the method of the first aspect.

[0028] According to a third aspect, a system is disclosed comprising: a computer processor; and the non-transitory computer-readable storage medium of the second aspect.

[0029] According to a fourth aspect, a method is disclosed for predicting a presence of a disease in a test sample, the method comprising: obtaining the test sample comprising a plurality of sequence reads for cell-free DNA (cfDNA) fragments in the test sample; identifying one or more contamination markers from a plurality of contamination markers for which the test sample has a homozygous haplotype; for each of the identified one or more contamination markers for which the test sample has a homozygous haplotype, identifying any cfDNA fragments in the test sample having a different haplotype at one of the identified contamination markers than the homozygous haplotype of the respective contamination marker as a contaminated cfDNA fragment; estimating a contamination level based on any identified contaminated cfDNA fragments; and determining whether the contamination level is below a threshold level; and responsive to determining that the contamination level is below the threshold level, performing disease classification to the sequence reads of the cfDNA fragments in the test sample to generate a disease prediction.

[0030] The method of the fourth aspect, wherein the plurality of contamination markers includes multiple single nucleotide polymorphism (multiple SNP) sites.

[0031] The method of the fourth aspect, wherein the multiple SNP sites are within 10 basepairs (bps).

[0032] The method of the fourth aspect, wherein the multiple SNP sites have population haplotype frequencies within the range 45%-55%.

[0033] The method of the fourth aspect, wherein the multiple SNP sites exclude guanine-adenine polymorphisms and cytosine-thymine polymorphisms.

[0034] The method of the fourth aspect, wherein the haplotypes of each multiple SNP site are in Hardy-Weinberg equilibrium.

[0035] The method of the fourth aspect, wherein the plurality of contamination markers includes at least 500, at least 1,000, at least 1,500, or at least 2,000 multiple SNP sites.

[0036] The method of the fourth aspect, wherein the plurality of contamination markers includes multiple SNP sites from Table 1.

[0037] The method of the fourth aspect, wherein the plurality of contamination markers includes insertion-deletion (indel) sites.

[0038] The method of the fourth aspect, wherein the indel sites are between 5 bps and 10 bps.

[0039] The method of the fourth aspect, wherein the indel sites have population haplotype frequencies within the range 45%-55%.

[0040] The method of the fourth aspect, wherein the haplotypes of each indel site are in Hardy-Weinberg equilibrium.

[0041] The method of the fourth aspect, wherein the plurality of contamination markers includes at least 500, at least 1,000, at least 1,500, or at least 2,000 indel sites.

[0042] The method of the fourth aspect, wherein the plurality of contamination markers includes indel sites from Table 3.

[0043] The method of the fourth aspect, wherein each contamination marker includes a probe designed to target each haplotype of the contamination marker.

[0044] The method of the fourth aspect, wherein estimating the contamination level is further based on one or more of: a number of identified contaminated cfDNA fragments, sequencing depth of the test sample, a number of cfDNA fragments in the test sample, and a number of contamination markers.

[0045] The method of the fourth aspect, wherein responsive to determining that the contamination level is above the threshold level, forgoing disease classification.

[0046] The method of the fourth aspect, wherein the disease prediction comprises a binary prediction between disease and no disease.

[0047] The method of the fourth aspect, wherein the disease prediction comprises a multiclass cancer prediction between a plurality of diseases.

[0048] The method of the fourth aspect, wherein performing the disease classification comprises: generating a test feature vector based on the sequence reads of the cfDNA fragments in the test sample; and inputting the test feature vector into a classification model to generate the disease prediction for the test sample.

[0049] The method of the fourth aspect, wherein performing the disease classification further comprises: filtering an initial set of cfDNA fragments of the test sample with p-value filtering to generate the set of anomalous fragments, the filtering comprising removing fragments from the initial set having below a threshold p-value with respect to other fragments to produce the set of anomalous fragments, wherein the test feature vector is based on the sequence reads of the set of anomalous fragments.

[0050] The method of the fourth aspect, wherein the classification model is a machine-learning model.

[0051] According to a fifth aspect, a non-transitory computer-readable storage medium is disclosed storing instructions that, when executed by the computer processor, cause the computer processor to perform the method of the fourth aspect.

[0052] According to a sixth aspect, a system is disclosed comprising: a computer processor; and the non-transitory computer-readable storage medium of the fifth aspect.

[0053] According to a seventh aspect, a method is disclosed for predicting a presence of contamination in a test sample, the method comprising: obtaining sequence reads derived from a plurality of cell-free DNA (cfDNA) fragments in the test sample; identifying, based on the sequence reads, one or more contamination markers from a plurality of contamination markers for which the test sample has a homozygous haplotype; identifying any cfDNA fragments in the test sample having a different haplotype at one of the identified contamination markers than the homozygous haplotype of the respective contamination marker as a contaminated cfDNA fragment; estimating a contamination level based on any identified contaminated cfDNA fragments; and determining whether the contamination level is below a threshold level; and responsive to determining that the contamination level is below the threshold level, generating a notification indicating that the test sample is contaminated.

[0054] The method of the seventh aspect, wherein the plurality of contamination markers includes multiple single nucleotide polymorphism (multiple SNP) sites.

[0055] The method of the seventh aspect, wherein the multiple SNP sites are within 10 basepairs (bps).

[0056] The method of the seventh aspect, wherein the multiple SNP sites have population haplotype frequencies within the range 45%-55%.

[0057] The method of the seventh aspect, wherein the multiple SNP sites exclude guanine-adenine polymorphisms and cytosine-thymine polymorphisms.

[0058] The method of the seventh aspect, wherein the haplotypes of each multiple SNP site are in Hardy-Weinberg equilibrium.

[0059] The method of the seventh aspect, wherein the plurality of contamination markers includes at least 500, at least 1,000, at least 1,500, or at least 2,000 multiple SNP sites.

[0060] The method of the seventh aspect, wherein the plurality of contamination markers includes multiple SNP sites from Table 1.

[0061] The method of the seventh aspect, wherein the plurality of contamination markers includes insertion-deletion (indel) sites.

[0062] The method of the seventh aspect, wherein the indel sites are between 5 bps and 10 bps.

[0063] The method of the seventh aspect, wherein the indel sites have population haplotype frequencies within the range 45%-55%.

[0064] The method of the seventh aspect, wherein the haplotypes of each indel site are in Hardy-Weinberg equilibrium.

[0065] The method of the seventh aspect, wherein the plurality of contamination markers includes at least 500, at least 1,000, at least 1,500, or at least 2,000 indel sites.

[0066] The method of the seventh aspect, wherein the plurality of contamination markers includes indel sites from Table 3.

[0067] The method of the seventh aspect, wherein each contamination marker includes a probe designed to target each haplotype of the contamination marker.

[0068] The method of the seventh aspect, wherein estimating the contamination level is further based on one or more of: a number of identified contaminated cfDNA fragments, sequencing depth of the test sample, a number of cfDNA fragments in the test sample, and a number of contamination markers.

[0069] According to an eight aspect, a non-transitory computer-readable storage medium is disclosed storing instructions that, when executed by the computer processor, cause the computer processor to perform the method of the seventh aspect.

[0070] According to a ninth aspect, a system is disclosed comprising: a computer processor; and the non-transitory computer-readable storage medium of the eighth aspect.

[0071] According to a tenth aspect, a method is disclosed for training a cancer classification model, the method comprising: obtaining a plurality of training samples including a first training sample, each training sample comprising a plurality of cell-free DNA (cfDNA) fragments; for each training sample, obtaining sequence reads derived from the cfDNA fragments in the training sample; for the first training sample: identifying, based on the sequence reads of the first training sample, one or more contamination markers from a plurality of contamination markers for which the first training sample has a homozygous haplotype, identifying any cfDNA fragments in the first training sample having a different haplotype at one of the identified contamination markers than the homozygous haplotype of the respective contamination marker as a contaminated cfDNA fragment, estimating a contamination level based on any identified contaminated cfDNA fragments, and determining whether the contamination level is below a threshold level; and, responsive to determining that the contamination level of the first training sample is above the threshold level, removing the first training sample from the plurality of training samples, wherein the plurality of training samples excluding the first training sample are used to train the cancer classification model to generate a cancer prediction for a test sample.

[0072] The method of the tenth aspect, wherein the plurality of contamination markers includes multiple single nucleotide polymorphism (multiple SNP) sites.

[0073] The method of the tenth aspect, wherein the multiple SNP sites are within 10 basepairs (bps).

[0074] The method of the tenth aspect, wherein the multiple SNP sites have population haplotype frequencies within the range 45%-55%.

[0075] The method of the tenth aspect, wherein the multiple SNP sites exclude guanine-adenine polymorphisms and cytosine-thymine polymorphisms.

[0076] The method of the tenth aspect, wherein the haplotypes of each multiple SNP site are in Hardy-Weinberg equilibrium.

[0077] The method of the tenth aspect, wherein the plurality of contamination markers includes at least 500, at least 1,000, at least 1,500, or at least 2,000 multiple SNP sites.

[0078] The method of the tenth aspect, wherein the plurality of contamination markers includes multiple SNP sites from Table 1.

[0079] The method of the tenth aspect, wherein the plurality of contamination markers includes insertion-deletion (indel) sites.

[0080] The method of the tenth aspect, wherein the indel sites are between 5 bps and 10 bps.

[0081] The method of the tenth aspect, wherein the indel sites have population haplotype frequencies within the range 45%-55%.

[0082] The method of the tenth aspect, wherein the haplotypes of each indel site are in Hardy-Weinberg equilibrium.

[0083] The method of the tenth aspect, wherein the plurality of contamination markers includes at least 500, at least 1,000, at least 1,500, or at least 2,000 indel sites.

[0084] The method of the tenth aspect, wherein the plurality of contamination markers includes indel sites from Table 3.

[0085] The method of the tenth aspect, wherein each contamination marker includes a probe designed to target each haplotype of the contamination marker.

[0086] The method of the tenth aspect, wherein the plurality of training samples comprises a first cohort of non-cancer samples and a second cohort of cancer samples, wherein the cancer classification model is trained to determine a likelihood of presence of cancer.

[0087] The method of the tenth aspect, wherein the second cohort of cancer samples comprises one or more samples having a first cancer type and one or more additional samples having a second cancer type, wherein the cancer classification model is trained to determine a first likelihood of presence of the first cancer type and a second likelihood of presence of the second cancer type.

[0088] The method of the tenth aspect, wherein the cancer classification model is a machine-learned model.

[0089] The method of the tenth aspect, wherein the cancer classification model is at least one of: a decision tree, a neural network, a multilayer perceptron, and a support vector machine.

[0090] According to an eleventh aspect, a non-transitory computer-readable storage medium is disclosed storing instructions that, when executed by the computer processor, cause the computer processor to perform the method of the tenth aspect.

[0091] According to a twelfth aspect, a system is disclosed comprising: a computer processor; and the non-transitory computer-readable storage medium of the eleventh aspect.

[0092] According to a thirteenth aspect, a computer program product is disclosed comprising: a non-transitory computer-readable storage medium storing a trained cancer classification model, wherein the computer program product is made by the method of the eleventh aspect.

[0093] According to a fourteenth aspect, a treatment kit is disclosed comprising: one or more collection vessels for storing a biological sample comprising genetic material from an individual; and a plurality of probes targeting a plurality of contamination markers, the plurality of probes including at least one of: Table 2, and Table 4.

[0094] The treatment kit of the fourteenth aspect, wherein the plurality of contamination markers includes multiple single nucleotide polymorphism (multiple SNP) sites.

[0095] The treatment kit of the fourteenth aspect, wherein the multiple SNP sites are within 10 basepairs (bps).

[0096] The treatment kit of the fourteenth aspect, wherein the multiple SNP sites have population haplotype frequencies within the range 45%-55%.

[0097] The treatment kit of the fourteenth aspect, wherein the multiple SNP sites exclude guanine-adenine polymorphisms and cytosine-thymine polymorphisms.

[0098] The treatment kit of the fourteenth aspect, wherein the haplotypes of each multiple SNP site are in Hardy-Weinberg equilibrium.

[0099] The treatment kit of the fourteenth aspect, wherein the plurality of contamination markers includes at least 500, at least 1,000, at least 1,500, or at least 2,000 multiple SNP sites.

[0100] The treatment kit of the fourteenth aspect, wherein the plurality of contamination markers includes multiple SNP sites from Table 1.

[0101] The treatment kit of the fourteenth aspect, wherein the plurality of contamination markers includes insertion-deletion (indel) sites.

[0102] The treatment kit of the fourteenth aspect, wherein the indel sites are between 5 bps and 10 bps.

[0103] The treatment kit of the fourteenth aspect, wherein the indel sites have population haplotype frequencies within the range 45%-55%.

[0104] The treatment kit of the fourteenth aspect, wherein the haplotypes of each indel site are in Hardy-Weinberg equilibrium.

[0105] The treatment kit of the fourteenth aspect, wherein the plurality of contamination markers includes at least 500, at least 1,000, at least 1,500, or at least 2,000 indel sites.

[0106] The treatment kit of the fourteenth aspect, wherein the plurality of contamination markers includes indel sites from Table 3.

[0107] The treatment kit of the fourteenth aspect, wherein each contamination marker includes a probe designed to target each haplotype of the contamination marker.

[0108] The treatment kit of the fourteenth aspect, further comprising: one or more reagents for isolating nucleic acid fragments in the biological sample.

[0109] The treatment kit of the fourteenth aspect, further comprising: a first computer program product comprising one or more of: the non-transitory computer-readable storage medium of the second aspect, the non-transitory computer-readable storage medium of the fifth aspect, the non-transitory computer-readable storage medium of eight aspect, and the non-transitory computer-readable storage medium of the eleventh aspect.

[0110] The treatment kit of the fourteenth aspect, further comprising: the computer program product of the thirteenth aspect.

### BRIEF DESCRIPTION OF DRAWINGS

[0111] FIG. 1 is an exemplary flowchart describing a process of contamination detection in a sample, according to one or more embodiments.

[0112] FIG. 2A is an exemplary flowchart describing a process of identifying multiple SNP sites for use as contamination markers in contamination detection, according to one or more embodiments.

[0113] FIG. 2B is an exemplary flowchart describing a process of identifying indel sites for use as contamination markers in contamination detection, according to one or more embodiments.

[0114] FIG. 3A is an exemplary flowchart describing a process of sequencing a fragment of cell-free (cf) DNA to obtain a methylation state vector, according to one or more embodiments.

[0115] FIG. 3B is an exemplary illustration of the process of FIG. 3A of sequencing a fragment of cell-free (cf) DNA to obtain a methylation state vector, according to one or more embodiments.

[0116] FIG. 4A is a flowchart describing a process of generating a data structure for a healthy control group, according to one or more embodiments.

[0117] FIG. 4B illustrate exemplary flowcharts describing a process of identifying anomalously methylated fragments from a sample, according to one or more embodiments.

[0118] FIG. 5A is an exemplary flowchart describing a process of training a cancer classifier, according to one or more embodiments.

[0119] FIG. 5B illustrates an example generation of feature vectors used for training the cancer classifier, according to one or more embodiments.

[0120] FIG. 6A illustrates an exemplary flowchart of devices for sequencing nucleic acid samples according to one or more embodiments.

[0121] FIG. 6B is an exemplary block diagram of an analytics system, according to one or more embodiments.

[0122] FIG. 7 illustrates the distribution of the fraction of the number of fragments classified as contamination to the total number of fragments called as reference or alternate for each contamination marker that was called as homozygous for a given sample, according to a first group of example results.

[0123] FIG. 8 illustrates a scatter plot of the allele frequencies of the contamination markers, according to the first group of example results.

[0124] FIG. 9 illustrates two graphs showing genotype and zygosity of the contamination markers, according to the first group of example results.

[0125] FIG. 10 illustrates a graph showing the fraction of contamination markers that were homozygous and had enough fragments overlapping with them for a given sample to be considered useful for estimating contamination for that sample, according to the first group of example results.

[0126] FIG. 11A illustrates graphs of estimated contamination levels for different batches of samples, according to the first group of example results.

[0127] FIG. 11B illustrates additional graphs of estimated contamination levels for different batches of samples, according to the first group of example results.

[0128] FIG. 12 illustrates the distribution of the number of unique cfDNA fragments obtained per contamination marker as listed in Table 2 and Table 4, according to a second group of example results.

[0129] FIG. 13 illustrates the results for a quality check process, according to the second group of example results.

[0130] FIG. 14 illustrates a scatter plot of the allele frequencies, according to the second group of example results.

[0131] FIG. 15 illustrates a scatter plot of the frequency that the marker is called as heterozygous, according to the second group of example results.

[0132] FIG. 16 illustrates a scatter plot of the values of the Hardy-Weinberg term, according to the second group of example results.

[0133] FIG. 17 illustrates the distribution of the fraction of the number of fragments classified as contamination to the total number of fragments called as reference or alternate for each contamination marker that was called as homozygous for the given sample, according to the second group of example results.

[0134] FIG. 18 illustrates the application of the formula for estimating contamination fraction for a hypothetical set of fragments, according to the second group of example results.

[0135] FIG. 19 illustrates the results of applying the contamination fraction model on simulated data, according to the second group of example results.

[0136] FIG. 20 illustrates the results of applying the contamination fraction model on 4 titration pairs of cfDNA samples, each with varying titration levels, according to the second group of example results.

[0137] FIG. 21 illustrates the distribution of estimated contamination fraction for the 84 cfDNA samples in the experiment, according to the second group of example results.

[0138] FIG. 22 illustrates that the estimates obtained for the 84 samples in the experiment, when considering the Multiple SNPs markers and the Indel markers separately by themselves, are highly correlated and do not show any significant systemic bias, according to the second group of example results.

[0139] FIG. 23 illustrates Table 1 including multiple SNP contamination markers, according to one or more embodiments.

[0140] FIG. 24 illustrates Table 2 including probe sequence listings for the multiple SNP contamination markers, according to one or more embodiments.

[0141] FIG. 25 illustrates Table 3 including indel contamination markers, according to one or more embodiments.

[0142] FIG. 26 illustrates Table 4 including probe sequence listings for the indel contamination markers, according to one or more embodiments.

[0143] The figures depict various embodiments for purposes of illustration only. One skilled in the art will readily recognize from the following discussion that alternative embodiments of the structures and methods illustrated herein may be employed without departing from the principles described herein.

### DETAILED DESCRIPTION

### I. Overview

### I.A. Overview of Methylation

[0144] In accordance with the present description, cfDNA fragments from an individual are treated, for example by converting unmethylated cytosines to uracils, sequenced and the sequence reads compared to a reference genome to identify the methylation states at specific CpG sites within the DNA fragments. Each CpG site may be methylated or unmethylated. Identification of anomalously methylated fragments, in comparison to healthy individuals, may provide insight into a subject's cancer status. As is well known in the art, DNA methylation anomalies (compared to healthy controls) can cause different effects, which may contribute to cancer. Various challenges arise in the identification of anomalously methylated cfDNA fragments. First off, determining a DNA fragment to be anomalously methylated can hold weight in comparison with a group of control individuals, such that if the control group is small in number, the determination loses confidence due to statistical variability within the smaller size of the control group. Additionally, among a group of control individuals, methylation status can vary which can be difficult to account for when determining a subject's DNA fragments to be anomalously methylated. On another note, methylation of a cytosine at a CpG site can causally influence methylation at a subsequent CpG site. To encapsulate this dependency can be another challenge in itself.

[0145] Methylation can typically occur in deoxyribonucleic acid (DNA) when a hydrogen atom on the pyrimidine ring of a cytosine base is converted to a methyl group, forming 5-methylcytosine. In particular, methylation can occur at dinucleotides of cytosine and guanine referred to herein as “CpG sites”. In other instances, methylation may occur at a cytosine not part of a CpG site or at another nucleotide that is not cytosine; however, these are rarer occurrences. In this present disclosure, methylation is discussed in reference to CpG sites for the sake of clarity. Anomalous DNA methylation can be identified as hypermethylation or hypomethylation, both of which may be indicative of cancer status. Throughout this disclosure, hypermethylation and hypomethylation can be characterized for a DNA fragment, if the DNA fragment comprises more than a threshold number of CpG sites with more than a threshold percentage of those CpG sites being methylated or unmethylated.

[0146] The principles described herein can be equally applicable for the detection of methylation in a non-CpG context, including non-cytosine methylation. In such embodiments, the wet laboratory assay used to detect methylation may vary from those described herein. Further, the methylation state vectors discussed herein may contain elements that are generally sites where methylation has or has not occurred (even if those sites are not CpG sites specifically). With that substitution, the remainder of the processes described herein can be the same, and consequently the inventive concepts described herein can be applicable to those other forms of methylation.

### I.B. Definitions

[0147] The term “cell free nucleic acid” or “cfNA” refers to nucleic acid fragments that circulate in an individual's body (e.g., blood) and originate from one or more healthy cells and/or from one or more unhealthy cells (e.g., cancer cells). The term “cell free DNA,” or “cfDNA” refers to deoxyribonucleic acid fragments that circulate in an individual's body (e.g., blood). Additionally, cfNAs or cfDNA in an individual's body may come from other non-human sources.

[0148] The term “genomic nucleic acid,” “genomic DNA,” or “gDNA” refers to nucleic acid molecules or deoxyribonucleic acid molecules obtained from one or more cells. In various embodiments, gDNA can be extracted from healthy cells (e.g., non-tumor cells) or from tumor cells (e.g., a biopsy sample). In some embodiments, gDNA can be extracted from a cell derived from a blood cell lineage, such as a white blood cell.

[0149] The term “circulating tumor DNA” or “ctDNA” refers to nucleic acid fragments that originate from tumor cells or other types of cancer cells, and which may be released into a bodily fluid of an individual (e.g., blood, sweat, urine, or saliva) as result of biological processes such as apoptosis or necrosis of dying cells or actively released by viable tumor cells.

[0150] The term “DNA fragment,” “fragment,” or “DNA molecule” may generally refer to any deoxyribonucleic acid fragments, i.e., cfDNA, gDNA, ctDNA, etc.

[0151] The term “anomalous fragment,” “anomalously methylated fragment,” or “fragment with an anomalous methylation pattern” refers to a fragment that has anomalous methylation of CpG sites. Anomalous methylation of a fragment may be determined using probabilistic models to identify unexpectedness of observing a fragment's methylation pattern in a control group.

[0152] The term “unusual fragment with extreme methylation” or “UFXM” refers to a hypomethylated fragment or a hypermethylated fragment. A hypomethylated fragment and a hypermethylated fragment refers to a fragment with at least some number of CpG sites (e.g., 5) that have over some threshold percentage (e.g., 90%) of methylation or unmethylation, respectively.

[0153] The term “anomaly score” refers to a score for a CpG site based on a number of anomalous fragments (or, in some embodiments, UFXMs) from a sample overlaps that CpG site. The anomaly score is used in context of featurization of a sample for classification.

[0154] As used herein, the term “about” or “approximately” can mean within an acceptable error range for the particular value as determined by one of ordinary skill in the art, which can depend in part on how the value is measured or determined, e.g., the limitations of the measurement system. For example, “about” can mean within 1 or more than 1 standard deviation, per the practice in the art. “About” can mean a range of ±20%, ±10%, ±5%, or ±1% of a given value. The term “about” or “approximately” can mean within an order of magnitude, within 5-fold, or within 2-fold, of a value. Where particular values are described in the application and claims, unless otherwise stated the term “about” meaning within an acceptable error range for the particular value should be assumed. The term “about” can have the meaning as commonly understood by one of ordinary skill in the art. The term “about” can refer to ±10%. The term “about” can refer to ±5%.

[0155] As used herein, the term “biological sample,” “patient sample,” or “sample” refers to any sample taken from a subject, which can reflect a biological state associated with the subject, and that includes cell-free DNA. Examples of biological samples include, but are not limited to, blood, whole blood, plasma, serum, urine, cerebrospinal fluid, fecal, saliva, sweat, tears, pleural fluid, pericardial fluid, or peritoneal fluid of the subject. A biological sample can include any tissue or material derived from a living or dead subject. A biological sample can be a cell-free sample. A biological sample can comprise a nucleic acid (e.g., DNA or RNA) or a fragment thereof. The term “nucleic acid” can refer to deoxyribonucleic acid (DNA), ribonucleic acid (RNA) or any hybrid or fragment thereof. The nucleic acid in the sample can be a cell-free nucleic acid. A sample can be a liquid sample or a solid sample (e.g., a cell or tissue sample). A biological sample can be a bodily fluid, such as blood, plasma, serum, urine, vaginal fluid, fluid from a hydrocele (e.g., of the testis), vaginal flushing fluids, pleural fluid, ascitic fluid, cerebrospinal fluid, saliva, sweat, tears, sputum, bronchoalveolar lavage fluid, discharge fluid from the nipple, aspiration fluid from different parts of the body (e.g., thyroid, breast), etc. A biological sample can be a stool sample. In various embodiments, the majority of DNA in a biological sample that has been enriched for cell-free DNA (e.g., a plasma sample obtained via a centrifugation protocol) can be cell-free (e.g., greater than 50%, 60%, 70%, 80%, 90%, 95%, or 99% of the DNA can be cell-free). A biological sample can be treated to physically disrupt tissue or cell structure (e.g., centrifugation and/or cell lysis), thus releasing intracellular components into a solution which can further contain enzymes, buffers, salts, detergents, and the like which can be used to prepare the sample for analysis.

[0156] As used herein, the terms “control,” “control sample,” “reference,” “reference sample,” “normal,” and “normal sample” describe a sample from a subject that does not have a particular condition, or is otherwise healthy. In an example, a method as disclosed herein can be performed on a subject having a tumor, where the reference sample is a sample taken from a healthy tissue of the subject. A reference sample can be obtained from the subject, or from a database. The reference can be, e.g., a reference genome that is used to map nucleic acid fragment sequences obtained from sequencing a sample from the subject. A reference genome can refer to a haploid or diploid genome to which nucleic acid fragment sequences from the biological sample and a constitutional sample can be aligned and compared. An example of a constitutional sample can be DNA of white blood cells obtained from the subject. For a haploid genome, there can be only one nucleotide at each locus. For a diploid genome, heterozygous loci can be identified; each heterozygous locus can have two alleles, where either allele can allow a match for alignment to the locus.

[0157] As used herein, the term “cancer” or “tumor” refers to an abnormal mass of tissue in which the growth of the mass surpasses and is not coordinated with the growth of normal tissue.

[0158] As used herein, the phrase “healthy,” refers to a subject possessing good health. A healthy subject can demonstrate an absence of any malignant or non-malignant disease. A “healthy individual” can have other diseases or conditions, unrelated to the condition being assayed, which can normally not be considered “healthy.”

[0159] As used herein, the term “methylation” refers to a modification of deoxyribonucleic acid (DNA) where a hydrogen atom on the pyrimidine ring of a cytosine base is converted to a methyl group, forming 5-methylcytosine. In particular, methylation tends to occur at dinucleotides of cytosine and guanine referred to herein as “CpG sites.” In other instances, methylation may occur at a cytosine not part of a CpG site or at another nucleotide that's not cytosine; however, these are rarer occurrences. Anomalous cfDNA methylation can be identified as hypermethylation or hypomethylation, both of which may be indicative of cancer status. DNA methylation anomalies (compared to healthy controls) can cause different effects, which may contribute to cancer. The principles described herein are equally applicable for the detection of methylation in a CpG context and non-CpG context, including non-cytosine methylation. Further, the methylation state vectors may contain elements that are generally vectors of sites where methylation has or has not occurred (even if those sites are not CpG sites specifically).

[0160] As used interchangeably herein, the term “methylation fragment” or “nucleic acid methylation fragment” refers to a sequence of methylation states for each CpG site in a plurality of CpG sites, determined by a methylation sequencing of nucleic acids (e.g., a nucleic acid molecule and/or a nucleic acid fragment). In a methylation fragment, a location and methylation state for each CpG site in the nucleic acid fragment is determined based on the alignment of the sequence reads (e.g., obtained from sequencing of the nucleic acids) to a reference genome. A nucleic acid methylation fragment comprises a methylation state of each CpG site in a plurality of CpG sites (e.g., a methylation state vector), which specifies the location of the nucleic acid fragment in a reference genome (e.g., as specified by the position of the first CpG site in the nucleic acid fragment using a CpG index, or another similar metric) and the number of CpG sites in the nucleic acid fragment. Alignment of a sequence read to a reference genome, based on a methylation sequencing of a nucleic acid molecule, can be performed using a CpG index. As used herein, the term “CpG index” refers to a list of each CpG site in the plurality of CpG sites (e.g., CpG 1, CpG 2, CpG 3, etc.) in a reference genome, such as a human reference genome, which can be in electronic format. The CpG index further comprises a corresponding genomic location, in the corresponding reference genome, for each respective CpG site in the CpG index. Each CpG site in each respective nucleic acid methylation fragment is thus indexed to a specific location in the respective reference genome, which can be determined using the CpG index.

[0161] As used herein, the term “true positive” (TP) refers to a subject having a condition. “True positive” can refer to a subject that has a tumor, a cancer, a pre-cancerous condition (e.g., a pre-cancerous lesion), a localized or a metastasized cancer, or a non-malignant disease. “True positive” can refer to a subject having a condition, and is identified as having the condition by an assay or method of the present disclosure. As used herein, the term “true negative” (TN) refers to a subject that does not have a condition or does not have a detectable condition. True negative can refer to a subject that does not have a disease or a detectable disease, such as a tumor, a cancer, a pre-cancerous condition (e.g., a pre-cancerous lesion), a localized or a metastasized cancer, a non-malignant disease, or a subject that is otherwise healthy. True negative can refer to a subject that does not have a condition or does not have a detectable condition, or is identified as not having the condition by an assay or method of the present disclosure.

[0162] As used herein, the term “reference genome” refers to any particular known, sequenced or characterized genome, whether partial or complete, of any organism or virus that may be used to reference identified sequences from a subject. Exemplary reference genomes used for human subjects as well as many other organisms are provided in the on-line genome browser hosted by the National Center for Biotechnology Information (“NCBI”) or the University of California, Santa Cruz (UCSC). A “genome” refers to the complete genetic information of an organism or virus, expressed in nucleic acid sequences. As used herein, a reference sequence or reference genome often is an assembled or partially assembled genomic sequence from an individual or multiple individuals. In some embodiments, a reference genome is an assembled or partially assembled genomic sequence from one or more human individuals. The reference genome can be viewed as a representative example of a species' set of genes. In some embodiments, a reference genome comprises sequences assigned to chromosomes. Exemplary human reference genomes include but are not limited to NCBI build 34 (UCSC equivalent: hg16), NCBI build 35 (UCSC equivalent: hg17), NCBI build 36.1 (UCSC equivalent: hg18), GRCh37 (UCSC equivalent: hg19), and GRCh38 (UCSC equivalent: hg38).

[0163] As used herein, the term “sequence reads” or “reads” refers to nucleotide sequences produced by any sequencing process described herein or known in the art. Reads can be generated from one end of nucleic acid fragments (“single-end reads”), and sometimes are generated from both ends of nucleic acids (e.g., paired-end reads, double-end reads). In some embodiments, sequence reads (e.g., single-end or paired-end reads) can be generated from one or both strands of a targeted nucleic acid fragment. The length of the sequence read is often associated with the particular sequencing technology. High-throughput methods, for example, provide sequence reads that can vary in size from tens to hundreds of base pairs (bp). In some embodiments, the sequence reads are of a mean, median or average length of about 15 bp to 900 bp long (e.g., about 20 bp, about 25 bp, about 30 bp, about 35 bp, about 40 bp, about 45 bp, about 50 bp, about 55 bp, about 60 bp, about 65 bp, about 70 bp, about 75 bp, about 80 bp, about 85 bp, about 90 bp, about 95 bp, about 100 bp, about 110 bp, about 120 bp, about 130, about 140 bp, about 150 bp, about 200 bp, about 450 bp, about 300 bp, about 350 bp, about 400 bp, about 450 bp, or about 500 bp. In some embodiments, the sequence reads are of a mean, median or average length of about 1000 bp, 2000 bp, 5000 bp, 10,000 bp, or 50,000 bp or more. Nanopore sequencing, for example, can provide sequence reads that can vary in size from tens to hundreds to thousands of base pairs. Illumina parallel sequencing can provide sequence reads that do not vary as much, for example, most of the sequence reads can be smaller than 200 bp. A sequence read (or sequencing read) can refer to sequence information corresponding to a nucleic acid molecule (e.g., a string of nucleotides). For example, a sequence read can correspond to a string of nucleotides (e.g., about 20 to about 150) from part of a nucleic acid fragment, can correspond to a string of nucleotides at one or both ends of a nucleic acid fragment, or can correspond to nucleotides of the entire nucleic acid fragment. A sequence read can be obtained in a variety of ways, e.g., using sequencing techniques or using probes, e.g., in hybridization arrays or capture probes, or amplification techniques, such as the polymerase chain reaction (PCR) or linear amplification using a single primer or isothermal amplification.

[0164] As used herein, the terms “sequencing” and the like as used herein refers generally to any and all biochemical processes that may be used to determine the order of biological macromolecules such as nucleic acids or proteins. For example, sequencing data can include all or a portion of the nucleotide bases in a nucleic acid molecule such as a DNA fragment.

[0165] As used herein, the term “sequencing depth,” is interchangeably used with the term “coverage” and refers to the number of times a locus is covered by a consensus sequence read corresponding to a unique nucleic acid target molecule aligned to the locus; e.g., the sequencing depth is equal to the number of unique nucleic acid target molecules covering the locus. The locus can be as small as a nucleotide, or as large as a chromosome arm, or as large as an entire genome. Sequencing depth can be expressed as “Y×”, e.g., 50×, 100×, etc., where “Y” refers to the number of times a locus is covered with a sequence corresponding to a nucleic acid target; e.g., the number of times independent sequence information is obtained covering the particular locus. In some embodiments, the sequencing depth corresponds to the number of genomes that have been sequenced. Sequencing depth can also be applied to multiple loci, or the whole genome, in which case Y can refer to the mean or average number of times a locus or a haploid genome, or a whole genome, respectively, is sequenced. When a mean depth is quoted, the actual depth for different loci included in the dataset can span over a range of values. Ultra-deep sequencing can refer to at least 100× in sequencing depth at a locus.

[0166] As used herein, the term “sensitivity” or “true positive rate” (TPR) refers to the number of true positives divided by the sum of the number of true positives and false negatives. Sensitivity can characterize the ability of an assay or method to correctly identify a proportion of the population that truly has a condition. For example, sensitivity can characterize the ability of a method to correctly identify the number of subjects within a population having cancer. In another example, sensitivity can characterize the ability of a method to correctly identify the one or more markers indicative of cancer.

[0167] As used herein, the term “specificity” or “true negative rate” (TNR) refers to the number of true negatives divided by the sum of the number of true negatives and false positives. Specificity can characterize the ability of an assay or method to correctly identify a proportion of the population that truly does not have a condition. For example, specificity can characterize the ability of a method to correctly identify the number of subjects within a population not having cancer. In another example, specificity characterizes the ability of a method to correctly identify one or more markers indicative of cancer.

[0168] As used herein, the term “subject” refers to any living or non-living organism, including but not limited to a human (e.g., a male human, female human, fetus, pregnant female, child, or the like), a non-human animal, a plant, a bacterium, a fungus or a protist. Any human or non-human animal can serve as a subject, including but not limited to mammal, reptile, avian, amphibian, fish, ungulate, ruminant, bovine (e.g., cattle), equine (e.g., horse), caprine and ovine (e.g., sheep, goat), swine (e.g., pig), camelid (e.g., camel, llama, alpaca), monkey, ape (e.g., gorilla, chimpanzee), ursid (e.g., bear), poultry, dog, cat, mouse, rat, fish, dolphin, whale, and shark. In some embodiments, a subject is a male or female of any stage (e.g., a man, a woman or a child). A subject from whom a sample is taken, or is treated by any of the methods or compositions described herein can be of any age and can be an adult, infant or child.

[0169] As used herein, the term “tissue” can correspond to a group of cells that group together as a functional unit. More than one type of cell can be found in a single tissue. Different types of tissue may consist of different types of cells (e.g., hepatocytes, alveolar cells or blood cells), but also can correspond to tissue from different organisms (mother vs. fetus) or to healthy cells vs. tumor cells. The term “tissue” can generally refer to any group of cells found in the human body (e.g., heart tissue, lung tissue, kidney tissue, nasopharyngeal tissue, oropharyngeal tissue). In some aspects, the term “tissue” or “tissue type” can be used to refer to a tissue from which a cell-free nucleic acid originates. In one example, viral nucleic acid fragments can be derived from blood tissue. In another example, viral nucleic acid fragments can be derived from tumor tissue.

[0170] As used herein, the term “genomic” refers to a characteristic of the genome of an organism. Examples of genomic characteristics include, but are not limited to, those relating to the primary nucleic acid sequence of all or a portion of the genome (e.g., the presence or absence of a nucleotide polymorphism, indel, sequence rearrangement, mutational frequency, etc.), the copy number of one or more particular nucleotide sequences within the genome (e.g., copy number, allele frequency fractions, single chromosome or entire genome ploidy, etc.), the epigenetic status of all or a portion of the genome (e.g., covalent nucleic acid modifications such as methylation, histone modifications, nucleosome positioning, etc.), the expression profile of the organism's genome (e.g., gene expression levels, isotype expression levels, gene expression ratios, etc.).

[0171] The terminology used herein is for the purpose of describing particular cases only and is not intended to be limiting. As used herein, the singular forms “a,” “an” and “the” are intended to include the plural forms as well, unless the context clearly indicates otherwise. Furthermore, to the extent that the terms “including,” “includes,” “having,” “has,” “with,” or variants thereof are used in either the detailed description and/or the claims, such terms are intended to be inclusive in a manner similar to the term “comprising.”

### I.C. Overview of Cancer Classification

[0172] Generally, in cancer classification, a biological sample is sequenced and analyzed to predict cancer from the sequence reads of the genetic material in the biological sample. The workflow can involve actions by one or more entities, e.g., including a healthcare provider, a sequencing device, an analytics system, etc. Objectives of the workflow include detecting and/or monitoring cancer in individuals. From a healthcare standpoint, the workflow can serve to supplement other existing cancer diagnostic tools. The workflow may serve to provide early cancer detection and/or routine cancer monitoring to better inform treatment plans for individuals diagnosed with cancer. The general workflow can be alternatively applied more generally to disease classification.

[0173] A healthcare provider performs sample collection. An individual to undergo cancer classification visits their healthcare provider. The healthcare provider collects the sample for performing cancer classification. Examples of biological samples include, but are not limited to, tissue biopsy, blood, whole blood, plasma, serum, urine, cerebrospinal fluid, fecal, saliva, sweat, tears, pleural fluid, pericardial fluid, or peritoneal fluid of the subject. The sample includes genetic material belonging to the individual, which may be extracted and sequenced for cancer classification. Once the sample is collected, the sample is provided to a sequencing device. Along with the sample, the healthcare provider may collect other information relating to the individual, e.g., biological sex, age, ethnicity, smoking status, any prior diagnoses, etc. In one or more embodiments, the healthcare provider may utilize a treatment kit. The treatment kit may include one or more sample collection vessels. The treatment kit may further comprise reagents, probes, computer program products, instructions, etc. for use in processing and analyzing the sample.

[0174] A sequencing device performs sample sequencing on the sample. A lab clinician may perform one or more processing steps to the sample in preparation of sequencing. The lab clinician may also utilize the treatment kit, including reagents, probes, etc. Once prepared, the clinician loads the sample in the sequencing device. An example of devices utilizes in sequencing is further described in conjunction with FIGS. 6A & 6B. The sequencing device generally extracts and isolates fragments of nucleic acid that are sequenced to determine a sequence of nucleobases corresponding to the fragments. Sequencing may also include amplification of nucleic material. Different sequencing processes include Sanger sequencing, fragment analysis, and next-generation sequencing. Sequencing may be whole-genome sequencing or targeted sequencing with a target panel. In context of DNA methylation, bisulfite sequencing (e.g., further described in FIGS. 3A & 3B) can determine methylations status through bisulfite conversion of unmethylated cytosines at CpG sites. Sample sequencing yields sequences for a plurality of nucleic acid fragments in the sample. In one or more embodiments, the sequences may include methylation state vectors, wherein each methylation state vector describes the methylation statuses for CpG sites on a fragment.

[0175] An analytics system then processes the sequence reads to generate the cancer prediction.

[0176] An analytics system may perform pre-analysis processing. Pre-analysis processing may include, but not limited to, de-duplication of sequence reads, determining metrics relating to coverage, determining whether the sample is contaminated, removal of contaminated fragments, calling sequencing error, etc. Samples determined to be contaminated may be withheld from further analysis. In other words, the analytics system may withhold performing further analyses (such as disease or cancer classification) on the contaminated sample. In some embodiments, contaminated samples may be physically discarded.

[0177] The analytics system performs one or more analyses. The analyses are statistical analyses or application of one or more trained models to predict at least a cancer status of the individual from whom the sample is derived. Different genetic features may be evaluated and considered, such as methylation of CpG sites, single nucleotide polymorphisms (SNPs), insertions or deletions (indels), other types of genetic mutation, etc. In context of methylation, analyses may include anomalous methylation identification (e.g., further described in FIGS. 4A & 4B), feature extraction (e.g., further described in FIGS. 5A & 5B), and applying a cancer classifier to determine a cancer prediction (e.g., further described in FIGS. 5A & 5B). The cancer classifier inputs the extracted features to determine a cancer prediction. The cancer prediction may be a label or a value. The label may indicate a particular cancer state, e.g., binary labels can indicate presence or absence of cancer, multiclass labels can indicate one or more cancer types from a plurality of cancer types that are screened for. The value may indicate a likelihood of a particular cancer state, e.g., a likelihood of cancer, and/or a likelihood of a particular cancer type. The prediction may further indicate a quantification of cancer signal, which may include a quantification of one or more particular tissues of origin signals.

[0178] The analytics system returns the prediction to the healthcare provider. The healthcare provider may establish or adjust a treatment plan based on the cancer prediction. Optimization of treatment is further described in Section VI.C. Treatment.

### II. Sample Processing

### II.A. Contamination Detection

[0179] FIG. 1 is an exemplary flowchart describing a process 100 of contamination detection in a sample, according to one or more embodiments. Generally, samples may be from individuals that are healthy, that are known to have or suspected of having cancer, or where no prior information is known. The sample may be selected from the group consisting of blood, plasma, serum, urine, fecal, and saliva samples. Alternatively, the sample may be selected from the group consisting of whole blood, a blood fraction (e.g., white blood cells (WBCs)), a tissue biopsy, pleural fluid, pericardial fluid, cerebral spinal fluid, and peritoneal fluid. Prior to cancer classification or other classification/analysis with the sample, the process 100 of contamination detection determines a contamination level of the sample. For instance, process 100 can output a contamination estimate and/or confidence interval that when compared to a rule (e.g., threshold contamination level or interval) will determine if the sample is contaminated. The contamination detection utilizes a set of genetic sequences as contamination markers to identify fragments that have an allele different from the individual's homozygous allele. The process 100 is described herein as being performed by an analytics system (an example of which is provided in FIGS. 6A & 6B and corresponding description), but some or all of the steps may be performed by other comparably described sequencing devices and/or computer processors.

[0180] The analytics system sequences 110 the cfDNA fragments in the sample with a target panel including contamination marker probes. The contamination markers are genetic sequences in the human genome and may include insertion-deletion (indel) sites and multiple single nucleotide polymorphism (SNP) sites. In some embodiments, the contamination markers comprise any combination of the multiple SNP sites listed in Table 1 and the indel sites listed in Table 3. For example, the contamination markers include at least 100, 200, 300, 400, 500, 600, 700, 800, 900, or 1,000 of the multiple SNP sites listed in Table 1 and at least 100, 200, 300, 400, 500, 600, 700, 800, 900, or 1,000 of the indel sites listed in Table 3. Contamination marker probes may be designed to target the contamination marker sequence on a single strand of the DNA or both strands of the DNA. In the context of methylation bisulfite sequencing, probes may be designed to target hypermethylated fragments, hypomethylated fragments, or both. Probes may also be designed to target one, some, or all haplotypes of the contamination marker sequence, e.g., for a multiple SNP site comprising two SNP sites (up to four potential haplotypes), the probes may target one, some, or all of the haplotypes. Designing probes that target all of the potential haplotypes of a contamination marker avoids reference bias to any one particular haplotype. In some embodiments, the probes designed for the contamination markers comprise any combination of the probes for multiple SNP sites listed in Table 2 and the probes for indel sites listed in Table 4. Contamination marker selection and subsequent probe design is discussed below in FIGS. 2A and 2B. As a result of the sequencing, the analytics system has sequence reads of the cfDNA fragments in the sample.

[0181] The analytics system identifies 120 one or more contamination markers from the plurality for which the sample has a homozygous haplotype. To determine the haplotype of the sample at each contamination marker, the analytics system evaluates the haplotypes of all sequence reads for cfDNA fragments at that contamination marker. The haplotype of a sequence read may be determined more accurately by realigning the read to all the probes designed for the contamination marker site, and identify the allele as the allele corresponding to the probe with the best alignment, where the different alignments can be ranked as per various sequence alignment metrics. If the analytics system observes a sufficient number of reads, e.g. at least 10, 20, 30, 40, 50, and that for very high percentage, e.g., above 90%, 91%, 92%, 93%, 94%, 95%, 96%, 97%, 98%, or 99%, of sequence reads having one haplotype, then the analytics system determines the sample is homozygous for that haplotype (i.e., both copies of the contamination marker in the sample are of the same haplotype). Contamination markers that do not surpass the high percentage are determined not to be homozygous and may rather be determined to be heterozygous (i.e., the two copies of the contamination marker in the sample are of differing haplotype).

[0182] The analytics system identifies 130 any cfDNA fragment having a different haplotype at one of the identified contamination markers than the homozygous haplotype of the respective contamination marker as a contaminated fragment. For each identified contamination marker, the analytics system labels or otherwise identifies cfDNA fragments as contamination (also referred to as “contaminated fragment(s)”) if they have a different haplotype at the identified contamination marker than the homozygous haplotype of the sample. Of the plurality of contamination markers utilized, any given sample likely has homozygous haplotypes for a subset of the initial plurality.

[0183] The analytics system estimates 140 a contamination level based on any identified contaminated fragments. For example, no identified contaminated fragments may result in a contamination level of 0 or 0%. The analytics system may estimate the contamination level further based on a sequencing depth of the sample, a total number of cfDNA fragments in the sample, a number of contamination markers implemented, a total number of contaminated fragments identified, or some combination thereof. In some examples, the analytics system counts the cfDNA fragments that have a different haplotype to estimate the contamination within a certain confidence interval.

[0184] The analytics system determines 150 whether the sample is contaminated by comparing the contamination level to a threshold. In some examples, the analytics system compares the estimated contamination level to a threshold contamination level, limit, or interval. The threshold contamination level or interval can be adjusted or varied depending on the application. For example, sensitive applications can require a very low contamination threshold. Merely by way of example, the threshold contamination level can be a value or interval between 0.1-1.0% or 0.01-1.0%. In some examples, the threshold contamination limit is 0.1%. In some examples, the threshold contamination limit is 0.01%. In some cases, if an estimated contamination level for a sample exceeds the threshold contamination limit, the analytics system can refuse to produce a cancer classification result (e.g., refuse to call the sample as cancer or non-cancer), refuse to include the sample in a training set for training a classifier (e.g., a binary or multiclass classifier for calling cancer/non-cancer or various tissues of origin for cancer), and/or prevent a disease or no disease classification result based on the contaminated sample. Additionally and/or alternatively, the analytics system uses the comparison to determine if the sample is contaminated or not. For example, if the sample is below the threshold, then the analytics system may determine the sample to be not contaminated. Conversely, if the sample is at or above the threshold, then the analytics system may determine the sample is contaminated.

[0185] FIG. 2A is an exemplary flowchart describing a process 200 of identifying multiple SNP sites for use as contamination markers in contamination detection, according to one or more embodiments. The process 200 is described herein as being performed by the analytics system, but some or all of the steps may be performed by other comparably described sequencing devices and/or computer processors.

[0186] The analytics system identifies 205 multiple SNP sites within a threshold distance. Multiple SNP sites are genetic sequences including at least two SNP sites. In one or more embodiments, the multiple SNP sites includes 2, 3, 4, or 5 SNP sites. The analytics system sets a threshold distance, e.g., 5 basepairs (bp), 10 bp, 15 bp, 20 bp, or 25 bp. SNP sites that are closer together have a higher chance of being present on single fragments; however, smaller threshold distances also limit the number of viable multiple SNP sites. The analytics system may tune the threshold distance given the above considerations and/or a budget of contamination marker probes that can be included in the target assay panel.

[0187] The analytics system includes 210 multiple SNP sites with haplotypes having population haplotype frequencies within a threshold range. With a 2-SNP site, there are two SNPs that each have two variant alleles. Thus, there are four distinct possible haplotypes that may occur: a first haplotype of [0, 0] where both SNP sites have no substitutions, a second haplotype of [1, 1] where both SNP sites have substitutions, a third haplotype of [0, 1] where just the second SNP site has a substitution, and a fourth haplotype of [1, 0] where just the first SNP site has a substitution. The analytics system identifies, from the multiple SNP sites included in step 210, those that have two haplotypes (of the four potential haplotypes in a 2-SNP site) with population haplotype frequencies within a threshold range around 50%. The population haplotype frequency can be obtained from a genome database or determined using a set of samples representing the population. The threshold range may be ±1%, ±2%, ±3%, ±4%, ±5%, ±6%, ±7%, ±8%, ±9%, or ±10% of 50%. For example, the analytics system includes a 2-SNP site where the haplotypes [0, 0] and [1, 1] have substantial population haplotype frequencies within the threshold range while [1, 0] and [0, 1] have small population haplotype frequencies. In another example, the analytics system includes a 2-SNP sites where the haplotypes [1, 0] and [0, 1] have substantial population haplotype frequencies within the threshold range while [0, 0] and [1, 1] have small population haplotype frequencies.

[0188] The analytics system excludes 215 multiple SNP sites with guanine-adenine polymorphisms and cytosine-thymine polymorphisms. The analytics system excludes such multiple SNP sites to avoid issues with bisulfite sequencing, e.g., for methylation sequencing. In embodiments that rely on other types of sequencing, the analytics system may skip step 215.

[0189] The analytics system ensures 220 haplotypes at each multiple SNP sites are in Hardy-Weinberg equilibrium. For each of the SNP sites in a multiple SNP site, the analytics system calculates an allele frequency for each allele of the SNP site. The allele frequency can be calculated using data obtained from a genetic database or with a set of samples representing the population. The analytics system then checks whether the allele frequencies for each SNP site are in Hardy-Weinberg equilibrium:

p²+2pq+q²=1

where p is the allele frequency for a first allele of the SNP site and q is the allele frequency for a second allele of the SNP site. Checking whether each SNP site of the multiple SNP sites are in Hardy-Weinberg equilibrium ensures against artifacts arising out of SNP sites that may be evolving or mutating, i.e., that are not in equilibrium. The analytics system may incorporate some tolerance in the Hardy-Weinberg equilibrium calculation.

[0190] The analytics system may omit one or more of the steps 205, 210, 215, and 220. As previously described above, in embodiments absent bisulfite sequencing, step 215 may be omitted. In other embodiments, step 210 and/or step 220 may be omitted.

[0191] At this juncture, the analytics system has identified multiple SNP sites after one, some, or all of steps 205, 210, 215, and 220 as viable for use as contamination markers. The analytics system may further trim down the number of viable multiple SNP sites based on a budget of contamination markers that may be implemented in the sequencing panel. The analytics system may optimize distribution of the multiple SNP site contamination markers throughout the genome. The analytics system may also adjust the various parameters at the steps 205, 210, 215, and 220 to optimize how many multiple SNP sites are selected as contamination markers. For example, the analytics system may increase the threshold distance in step 205 to increase the number of multiple SNP sites that may be considered in steps 210, 215, and 220. As another example, the analytics system may decrease the threshold range in step 210 to decrease the number of multiple SNP sites that may be considered in steps 215 and 220. Table 1 includes a list of multiple SNP sites selected for use as contamination markers, according to an example implementation. In one or more embodiments, the multiple SNP sites may be ranked according to a list of criteria. The criteria may include (1) complexity (k-mer entropy) of the sequence surrounding the SNP positions, (2) similarity of the designed probes to other regions in the genome, (3) deviation of population haplotype frequency from an ideal value of 0.5, (4) read duplication rate at the site, as observed in real sequenced samples, etc.

[0192] The analytics system designs 225 contamination marker probes targeting each haplotype of the multiple SNP site contamination markers. Depending on which two haplotypes are considered at step 210 for each multiple SNP site contamination marker, the analytics system designs probes targeting each of the two haplotypes. The analytics system may also design probes targeting both DNA strands of each haplotype. Designing probes targeting each haplotype of the contamination marker avoids reference or alternative bias in sequencing. In another embodiment, the analytics system designs a single probe targeting the reference sequence of each multiple SNP site contamination marker. Table 2 includes a list of probes designed for the multiple SNP site contamination markers in Table 1, according to an example implementation.

[0193] FIG. 2B is an exemplary flowchart describing a process 230 of identifying indel sites for use as contamination markers in contamination detection, according to one or more embodiments. The process 230 is described herein as being performed by the analytics system, but some or all of the steps may be performed by other comparably described sequencing devices and/or computer processors.

[0194] The analytics system identifies 235 indel sites within a range of lengths. Indel sites are genetic sequences that are either inserted or deleted from an individual's genome. The range of lengths may be, for example, 5-10 bp, 5-15 bp, 5-20 bp, 5-25 bp, 5-50 bp, 5-100 bp, 10-15 bp, 10-20 bp, 10-25 bp, 10-50 bp, 10-100 bp, 15-20 bp, 15-25 bp, 15-50 bp, or 15-100 bp.

[0195] The analytics system includes 240 indel sites with high complexity. Indel sites with low complexity include homopolymers and simple tandem repeats. Homopolymers are strings of one repeated nucleotide, e.g., ACGTTTTTTTTTTTTTTTACG includes a homopolymer of fifteen thymines. For homopolymers, there may be a threshold repetition number to be considered low complexity, e.g., 5 or more repetitions would be considered low complexity. Simple tandem repeats are strings of repeated nucleotide tandems, e.g., ACGTCATCATCATCATCATCATCATACGT includes seven repeated instances of the nucleotide tandem CAT. For simple tandem repeats, there may be a threshold number of repeats to be considered low complexity, e.g., 3 or more repetitions to be considered low complexity. High complexity sequences may include sequences of higher length without homopolymers or simple tandem repeats. For instance, high complexity sequence contexts can include particularly long indels or particularly specific long insertions, e.g., ACGTACCGGGTTTTCA where “ACCGGGTTTT” is the inserted sequence. High complexity indel sequences ensure screening against contaminated fragments as opposed to errors introduced via sample processing, e.g., polymerase chain reaction (PCR) or sequencing.

[0196] The analytics system includes 245 indel sites having a population allele frequency within a threshold range. The population allele frequency can be obtained from a genome database or determined using a set of samples representing the population. The threshold range may be ±1%, ±2%, ±3%, ±4%, ±5%, ±6%, ±7%, ±8%, ±9%, or ±10% of 50%. With insertion sequences, the first allele is absent the inserted sequence whereas the second allele includes the inserted sequence. With deletions, the first allele includes the deleted sequence whereas the second allele is absent the deleted sequence.

[0197] The analytics system ensures 250 alleles at each indel site are in Hardy-Weinberg equilibrium. For each of the indel sites, the analytics system calculates an allele frequency for each allele of the indel site. The allele frequency can be calculated using data obtained from a genetic database or with a set of samples representing the population. The analytics system then checks whether the allele frequencies for each indel site are in Hardy-Weinberg equilibrium:

p²+2pq+q²=1

where p is the allele frequency for a first allele of the indel site and q is the allele frequency for a second allele of the indel site. Checking whether each indel site is in Hardy-Weinberg equilibrium ensures against artifacts arising out of indel sites that may be evolving or mutating, i.e., that are not in equilibrium. The analytics system may incorporate some tolerance in the Hardy-Weinberg equilibrium calculation.

[0198] The analytics system may omit one or more of the steps 235, 240, 245, and 250.

[0199] At this juncture, the analytics system has identified indel sites after one, some, or all of steps 235, 240, 245, and 250 as viable for use as contamination markers. The analytics system may further trim down the number of viable indel sites based on a budget of contamination markers that may be implemented in the sequencing panel. The analytics system may optimize distribution of the indel site contamination markers throughout the genome. The analytics system may also adjust the various parameters at the steps 235, 240, 245, and 250 to optimize how many indel sites are selected as contamination markers. For example, the analytics system may widen the range of lengths in step 235 to increase the number of indel sites that may be considered in steps 240, 245, and 250. Table 3 includes a list of indel sites selected for use as contamination markers, according to an example implementation. In one or more embodiments, the indel sites may be ranked according to one or more criteria. The criteria may include (1) similarity of the designed probes to other regions in the genome, (2) deviation of population haplotype frequency from an ideal value of 0.5, (3) read duplication rate at the site, as observed in real sequenced samples, other criteria, or some combination thereof. The indel sites may be selected according to the ranking and according to some budget for indel sites.

[0200] The analytics system designs 255 contamination marker probes targeting each allele of the indel site contamination markers. The analytics system designs probes targeting each of the two alleles. The analytics system may also design probes targeting both DNA strands of each allele. Designing probes targeting each allele of the contamination marker avoids reference or alternative bias in sequencing. In another embodiment, the analytics system designs a single probe targeting the reference sequence of each indel site contamination marker. Table 4 includes a list of probes designed for the indel site contamination markers in Table 3, according to an example implementation.

### II.B. Generating Methylation State Vectors for DNA Fragments

[0201] FIG. 3A is an exemplary flowchart describing a process 300 of sequencing a fragment of cfDNA to obtain a methylation state vector, according to one or more embodiments. In order to analyze DNA methylation, an analytics system first obtains 310 a sample from an individual comprising a plurality of cfDNA molecules. In additional embodiments, the process 300 may be applied to sequence other types of DNA molecules.

[0202] From the sample, the analytics system can isolate each cfDNA molecule. The cfDNA molecules can be treated to convert unmethylated cytosines to uracils. In one embodiment, the method uses a bisulfite treatment of the DNA which converts the unmethylated cytosines to uracils without converting the methylated cytosines. For example, a commercial kit such as the EZ DNA Methylation™—Gold, EZ DNA Methylation™—Direct or an EZ DNA Methylation™—Lightning kit (available from Zymo Research Corp (Irvine, Calif.)) is used for the bisulfite conversion. In another embodiment, the conversion of unmethylated cytosines to uracils is accomplished using an enzymatic reaction. For example, the conversion can use a commercially available kit for conversion of unmethylated cytosines to uracils, such as APOBEC-Seq (NEBiolabs, Ipswich, Mass.).

[0203] From the converted cfDNA molecules, a sequencing library can be prepared 330.

[0204] During library preparation, unique molecular identifiers (UMI) can be added to the nucleic acid molecules (e.g., DNA molecules) through adapter ligation. The UMIs can be short nucleic acid sequences (e.g., 4-10 base pairs) that are added to ends of DNA fragments (e.g., DNA molecules fragmented by physical shearing, enzymatic digestion, and/or chemical fragmentation) during adapter ligation. UMIs can be degenerate base pairs that serve as a unique tag that can be used to identify sequence reads originating from a specific DNA fragment. During PCR amplification following adapter ligation, the UMIs can be replicated along with the attached DNA fragment. This can provide a way to identify sequence reads that came from the same original fragment in downstream analysis.

[0205] Optionally, the sequencing library may be enriched 135 for cfDNA molecules, or genomic regions, that are informative for cancer status using a plurality of hybridization probes. The hybridization probes are short oligonucleotides capable of hybridizing to particularly specified cfDNA molecules, or targeted regions, and enriching for those fragments or regions for subsequent sequencing and analysis. Hybridization probes may be used to perform a targeted, high-depth analysis of a set of specified CpG sites of interest to the researcher. Hybridization probes can be tiled across one or more target sequences at a coverage of 1×, 2×, 3×, 4×, 5×, 6×, 7×, 8×, 9×, 10×, or more than 10×. For example, hybridization probes tiled at a coverage of 2× comprises overlapping probes such that each portion of the target sequence is hybridized to 2 independent probes. Hybridization probes can be tiled across one or more target sequences at a coverage of less than 1×.

[0206] In one embodiment, the hybridization probes are designed to enrich for DNA molecules that have been treated (e.g., using bisulfite) for conversion of unmethylated cytosines to uracils. During enrichment, hybridization probes (also referred to herein as “probes”) can be used to target and pull down nucleic acid fragments informative for the presence or absence of cancer (or disease), cancer status, or a cancer classification (e.g., cancer class or tissue of origin). The probes may be designed to anneal (or hybridize) to a target (complementary) strand of DNA. The target strand may be the “positive” strand (e.g., the strand transcribed into mRNA, and subsequently translated into a protein) or the complementary “negative” strand. The probes may range in length from 10s, 100s, or 1000s of base pairs. The probes can be designed based on a methylation site panel. The probes can be designed based on a panel of targeted genes to analyze particular mutations or target regions of the genome (e.g., of the human or another organism) that are suspected to correspond to certain cancers or other types of diseases. Moreover, the probes may cover overlapping portions of a target region.

[0207] Once prepared, the sequencing library or a portion thereof can be sequenced to obtain a plurality of sequence reads. The sequence reads may be in a computer-readable, digital format for processing and interpretation by computer software. The sequence reads may be aligned to a reference genome to determine alignment position information. The alignment position information may indicate a beginning position and an end position of a region in the reference genome that corresponds to a beginning nucleotide base and end nucleotide base of a given sequence read. Alignment position information may also include sequence read length, which can be determined from the beginning position and end position. A region in the reference genome may be associated with a gene or a segment of a gene. A sequence read can be comprised of a read pair denoted as R₁ and R₂. For example, the first read R₁ may be sequenced from a first end of a nucleic acid fragment whereas the second read R₂ may be sequenced from the second end of the nucleic acid fragment. Therefore, nucleotide base pairs of the first read R₁ and second read R₂ may be aligned consistently (e.g., in opposite orientations) with nucleotide bases of the reference genome. Alignment position information derived from the read pair R₁ and R₂ may include a beginning position in the reference genome that corresponds to an end of a first read (e.g., R₁) and an end position in the reference genome that corresponds to an end of a second read (e.g., R₂). In other words, the beginning position and end position in the reference genome can represent the likely location within the reference genome to which the nucleic acid fragment corresponds. An output file having SAM (sequence alignment map) format or BAM (binary) format may be generated and output for further analysis such as methylation state determination.

[0208] From the sequence reads, the analytics system determines 350 a location and methylation state for each CpG site based on alignment to a reference genome. The analytics system generates 360 a methylation state vector for each fragment specifying a location of the fragment in the reference genome (e.g., as specified by the position of the first CpG site in each fragment, or another similar metric), a number of CpG sites in the fragment, and the methylation state of each CpG site in the fragment whether methylated (e.g., denoted as M), unmethylated (e.g., denoted as U), or indeterminate (e.g., denoted as I). Observed states can be states of methylated and unmethylated; whereas, an unobserved state is indeterminate. Indeterminate methylation states may originate from sequencing errors and/or disagreements between methylation states of a DNA fragment's complementary strands. The methylation state vectors may be stored in temporary or persistent computer memory for later use and processing. Further, the analytics system may remove duplicate reads or duplicate methylation state vectors from a single sample. The analytics system may determine that a certain fragment with one or more CpG sites has an indeterminate methylation status over a threshold number or percentage, and may exclude such fragments or selectively include such fragments but build a model accounting for such indeterminate methylation statuses; one such model will be described below in conjunction with FIG. 4.

[0209] FIG. 3B is an exemplary illustration of the process 300 of FIG. 3A of sequencing a cfDNA molecule to obtain a methylation state vector, according to one or more embodiments. As an example, the analytics system receives a cfDNA molecule 312 that, in this example, contains three CpG sites. As shown, the first and third CpG sites of the cfDNA molecule 312 are methylated 314. During the treatment step 320, the cfDNA molecule 312 is converted to generate a converted cfDNA molecule 322. During the treatment 320, the second CpG site which was unmethylated has its cytosine converted to uracil. However, the first and third CpG sites were not converted.

[0210] After conversion, a sequencing library 330 is prepared and sequenced 340 to generate a sequence read 342. The analytics system aligns 350 the sequence read 342 to a reference genome 344. The reference genome 344 provides the context as to what position in a human genome the fragment cfDNA originates from. In this simplified example, the analytics system aligns 350 the sequence read 342 such that the three CpG sites correlate to CpG sites 23, 24, and 25 (arbitrary reference identifiers used for convenience of description). The analytics system can thus generate information both on methylation status of all CpG sites on the cfDNA molecule 312 and the position in the human genome that the CpG sites map to. As shown, the CpG sites on sequence read 342 which are methylated are read as cytosines. In this example, the cytosines appear in the sequence read 342 only in the first and third CpG site which allows one to infer that the first and third CpG sites in the original cfDNA molecule are methylated. Whereas, the second CpG site can be read as a thymine (U is converted to T during the sequencing process), and thus, one can infer that the second CpG site is unmethylated in the original cfDNA molecule. With these two pieces of information, the methylation status and location, the analytics system generates 360 a methylation state vector 352 for the fragment cfDNA 312. In this example, the resulting methylation state vector 352 is <M₂₃, U₂₄, M₂₅>, wherein M corresponds to a methylated CpG site, U corresponds to an unmethylated CpG site, and the subscript number corresponds to a position of each CpG site in the reference genome.

[0211] One or more alternative sequencing methods can be used for obtaining sequence reads from nucleic acids in a biological sample. The one or more sequencing methods can comprise any form of sequencing that can be used to obtain a number of sequence reads measured from nucleic acids (e.g., cell-free nucleic acids), including, but not limited to, high-throughput sequencing systems such as the Roche 454 platform, the Applied Biosystems SOLID platform, the Helicos True Single Molecule DNA sequencing technology, the sequencing-by-hybridization platform from Affymetrix Inc., the single-molecule, real-time (SMRT) technology of Pacific Biosciences, the sequencing-by-synthesis platforms from 454 Life Sciences, Illumina/Solexa and Helicos Biosciences, and the sequencing-by-ligation platform from Applied Biosystems. The ION TORRENT technology from Life technologies and Nanopore sequencing can also be used to obtain sequence reads from the nucleic acids (e.g., cell-free nucleic acids) in the biological sample. Sequencing-by-synthesis and reversible terminator-based sequencing (e.g., Illumina's Genome Analyzer; Genome Analyzer II; HISEQ 2000; HISEQ 4500 (Illumina, San Diego Calif.)) can be used to obtain sequence reads from the cell-free nucleic acid obtained from a biological sample of a training subject in order to form the genotypic dataset. Millions of cell-free nucleic acid (e.g., DNA) fragments can be sequenced in parallel. In one example of this type of sequencing technology, a flow cell is used that contains an optically transparent slide with eight individual lanes on the surfaces of which are bound oligonucleotide anchors (e.g., adaptor primers). A cell-free nucleic acid sample can include a signal or tag that facilitates detection. The acquisition of sequence reads from the cell-free nucleic acid obtained from the biological sample can include obtaining quantification information of the signal or tag via a variety of techniques such as, for example, flow cytometry, quantitative polymerase chain reaction (qPCR), gel electrophoresis, gene-chip analysis, microarray, mass spectrometry, cytofluorimetric analysis, fluorescence microscopy, confocal laser scanning microscopy, laser scanning cytometry, affinity chromatography, manual batch mode separation, electric field suspension, sequencing, and combination thereof.

[0212] The one or more sequencing methods can comprise a whole-genome sequencing assay. A whole-genome sequencing assay can comprise a physical assay that generates sequence reads for a whole genome or a substantial portion of the whole genome which can be used to determine large variations such as copy number variations or copy number aberrations. Such a physical assay may employ whole-genome sequencing techniques or whole-exome sequencing techniques. A whole-genome sequencing assay can have an average sequencing depth of at least 1×, 2×, 3×, 4×, 5×, 6×, 7×, 8×, 9×, 10×, at least 20×, at least 30×, or at least 40× across the genome of the test subject. In some embodiments, the sequencing depth is about 30,000×. The one or more sequencing methods can comprise a targeted panel sequencing assay. A targeted panel sequencing assay can have an average sequencing depth of at least 50,000×, at least 55,000×, at least 60,000×, or at least 70,000× sequencing depth for the targeted panel of genes. The targeted panel of genes can comprise between 450 and 500 genes. The targeted panel of genes can comprise a range of 500±5 genes, a range of 500±10 genes, or a range of 500±25 genes.

[0213] The one or more sequencing methods can comprise paired-end sequencing. The one or more sequencing methods can generate a plurality of sequence reads. The plurality of sequence reads can have an average length ranging between 10 and 700, between 50 and 400, or between 100 and 300. The one or more sequencing methods can comprise a methylation sequencing assay. The methylation sequencing can be i) whole-genome methylation sequencing or ii) targeted DNA methylation sequencing using a plurality of nucleic acid probes. For example, the methylation sequencing is whole-genome bisulfite sequencing (e.g., WGBS). The methylation sequencing can be a targeted DNA methylation sequencing using a plurality of nucleic acid probes targeting the most informative regions of the methylome, a unique methylation database and prior prototype whole-genome and targeted sequencing assays.

[0214] The methylation sequencing can detect one or more 5-methylcytosine (5mC) and/or 5-hydroxymethylcytosine (5hmC) in respective nucleic acid methylation fragments. The methylation sequencing can comprise conversion of one or more unmethylated cytosines or one or more methylated cytosines, in respective nucleic acid methylation fragments, to a corresponding one or more uracils. The one or more uracils can be detected during the methylation sequencing as one or more corresponding thymines. The conversion of one or more unmethylated cytosines or one or more methylated cytosines can comprise a chemical conversion, an enzymatic conversion, or combinations thereof.

[0215] For example, bisulfite conversion involves converting cytosine to uracil while leaving methylated cytosines (e.g., 5-methylcytosine or 5-mC) intact. In some DNA, about 95% of cytosines may not methylated in the DNA, and the resulting DNA fragments may include many uracils which are represented by thymines. Enzymatic conversion processes may be used to treat the nucleic acids prior to sequencing, which can be performed in various ways. One example of a bisulfite-free conversion comprises a bisulfite-free and base-resolution sequencing method, TET-assisted pyridine borane sequencing (TAPS), for non-destructive and direct detection of 5-methylcytosine and 5-hydroxymethylcytosine without affecting unmodified cytosines. The methylation state of a CpG site in the corresponding plurality of CpG sites in the respective nucleic acid methylation fragment can be methylated when the CpG site is determined by the methylation sequencing to be methylated, and unmethylated when the CpG site is determined by the methylation sequencing to not be methylated.

[0216] A methylation sequencing assay (e.g., WGBS and/or targeted methylation sequencing) can have an average sequencing depth including but not limited to up to about 1,000×, 2,000×, 3,000×, 5,000×, 10,000×, 15,000×, 20,000×, or 30,000×. The methylation sequencing can have a sequencing depth that is greater than 30,000×, e.g., at least 40,000× or 50,000×. A whole-genome bisulfite sequencing method can have an average sequencing depth of between 20× and 50×, and a targeted methylation sequencing method has an average effective depth of between 100× and 1000×, where effective depth can be the equivalent whole-genome bisulfite sequencing coverage for obtaining the same number of sequence reads obtained by targeted methylation sequencing.

[0217] For further details regarding methylation sequencing (e.g., WGBS and/or targeted methylation sequencing), see, e.g., U.S. Patent Application No. 62/642,480, entitled “Methylation Fragment Anomaly Detection,” filed Mar. 13, 2018, and U.S. patent application Ser. No. 16/719,902, entitled “Systems and Methods for Estimating Cell Source Fractions Using Methylation Information,” filed Dec. 18, 2019, each of which is hereby incorporated by reference. Other methods for methylation sequencing, including those disclosed herein and/or any modifications, substitutions, or combinations thereof, can be used to obtain fragment methylation patterns. A methylation sequencing can be used to identify one or more methylation state vectors, as described, for example, in U.S. patent application Ser. No. 16/352,602, entitled “Anomalous Fragment Detection and Classification,” filed Mar. 13, 2019, or in accordance with any of the techniques disclosed in U.S. patent application Ser. No. 15/931,022, entitled “Model-Based Featurization and Classification,” filed May 13, 2020, each of which is hereby incorporated by reference.

[0218] The methylation sequencing of nucleic acids and the resulting one or more methylation state vectors can be used to obtain a plurality of nucleic acid methylation fragments. Each corresponding plurality of nucleic acid methylation fragments (e.g., for each respective genotypic dataset) can comprise more than 100 nucleic acid methylation fragments. An average number of nucleic acid methylation fragments across each corresponding plurality of nucleic acid methylation fragments can comprise 1000 or more nucleic acid methylation fragments, 5000 or more nucleic acid methylation fragments, 10,000 or more nucleic acid methylation fragments, 20,000 or more nucleic acid methylation fragments, or 30,000 or more nucleic acid methylation fragments. An average number of nucleic acid methylation fragments across each corresponding plurality of nucleic acid methylation fragments can be between 10,000 nucleic acid methylation fragments and 50,000 nucleic acid methylation fragments. The corresponding plurality of nucleic acid methylation fragments can comprise one thousand or more, ten thousand or more, 100 thousand or more, one million or more, ten million or more, 100 million or more, 500 million or more, one billion or more, two billion or more, three billion or more, four billion or more, five billion or more, six billion or more, seven billion or more, eight billion or more, nine billion or more, or 10 billion or more nucleic acid methylation fragments. An average length of a corresponding plurality of nucleic acid methylation fragments can be between 140 and 480 nucleotides.

[0219] Further details regarding methods for sequencing nucleic acids and methylation sequencing data are disclosed in U.S. Provisional Patent Application No. 62/985,258, titled “Systems and Methods for Cancer Condition Determination Using Autoencoders,” filed Mar. 4, 2020, which is hereby incorporated herein by reference in its entirety.

### II.C. Identifying Anomalous Fragments

[0220] The analytics system can determine anomalous fragments for a sample using the sample's methylation state vectors. For each fragment in a sample, the analytics system can determine whether the fragment is an anomalous fragment using the methylation state vector corresponding to the fragment. In some embodiments, the analytics system calculates a p-value score for each methylation state vector describing a probability of observing that methylation state vector or other methylation state vectors even less probable in the healthy control group. The process for calculating a p-value score is further discussed below in Section II.C.i. P-Value Filtering. The analytics system may determine fragments with a methylation state vector having below a threshold p-value score as anomalous fragments. In some embodiments, the analytics system further labels fragments with at least some number of CpG sites that have over some threshold percentage of methylation or unmethylation as hypermethylated and hypomethylated fragments, respectively. A hypermethylated fragment or a hypomethylated fragment may also be referred to as an unusual fragment with extreme methylation (UFXM). In other embodiments, the analytics system may implement various other probabilistic models for determining anomalous fragments. Examples of other probabilistic models include a mixture model, a deep probabilistic model, etc. In some embodiments, the analytics system may use any combination of the processes described below for identifying anomalous fragments. With the identified anomalous fragments, the analytics system may filter the set of methylation state vectors for a sample for use in other processes, e.g., for use in training and deploying a cancer classifier.

### II.C.i P-Value Filtering

[0221] In some embodiments, the analytics system calculates a p-value score for each methylation state vector compared to methylation state vectors from fragments in a healthy control group. The p-value score can describe a probability of observing the methylation status matching that methylation state vector or other methylation state vectors even less probable in the healthy control group. In order to determine a DNA fragment to be anomalously methylated, the analytics system can use a healthy control group with a majority of fragments that are normally methylated. When conducting this probabilistic analysis for determining anomalous fragments, the determination can hold weight in comparison with the group of control subjects that make up the healthy control group. To ensure robustness in the healthy control group, the analytics system may select some threshold number of healthy individuals to source samples including DNA fragments. FIG. 4A below describes the method of generating a data structure for a healthy control group with which the analytics system may calculate p-value scores. FIG. 4B describes the method of calculating a p-value score with the generated data structure.

[0222] FIG. 4A is a flowchart describing a process 400 of generating a data structure for a healthy control group, according to an embodiment. To create a healthy control group data structure, the analytics system can receive a plurality of DNA fragments (e.g., cfDNA) from a plurality of healthy individuals. A methylation state vector can be identified for each fragment, for example via the process 300.

[0223] With each fragment's methylation state vector, the analytics system can subdivide 405 the methylation state vector into strings of CpG sites. In some embodiments, the analytics system subdivides 405 the methylation state vector such that the resulting strings are all less than a given length. For example, a methylation state vector of length 11 may be subdivided into strings of length less than or equal to 3 would result in 9 strings of length 3, 10 strings of length 2, and 11 strings of length 1. In another example, a methylation state vector of length 7 being subdivided into strings of length less than or equal to 4 can result in 4 strings of length 4, 5 strings of length 3, 6 strings of length 2, and 7 strings of length 1. If a methylation state vector is shorter than or the same length as the specified string length, then the methylation state vector may be converted into a single string containing all of the CpG sites of the vector.

[0224] The analytics system tallies 410 the strings by counting, for each possible CpG site and possibility of methylation states in the vector, the number of strings present in the control group having the specified CpG site as the first CpG site in the string and having that possibility of methylation states. For example, at a given CpG site and considering string lengths of 3, there are 2\hat{ }3 or 8 possible string configurations. At that given CpG site, for each of the 8 possible string configurations, the analytics system tallies 410 how many occurrences of each methylation state vector possibility come up in the control group. Continuing this example, this may involve tallying the following quantities: <Mₓ, Mₓ₊₁, Mₓ₊₂>, <Mₓ, Mₓ₊₁, Uₓ₊₂>, . . . , <Uₓ, Uₓ₊₁, Uₓ₊₂> for each starting CpG site x in the reference genome. The analytics system creates 415 the data structure storing the tallied counts for each starting CpG site and string possibility.

[0225] There are several benefits to setting an upper limit on string length. First, depending on the maximum length for a string, the size of the data structure created by the analytics system can dramatically increase in size. For instance, maximum string length of 4 means that every CpG site has at the very least 2\hat{ }4 numbers to tally for strings of length 4. Increasing the maximum string length to 5 means that every CpG site has an additional 2\hat{ }4 or 16 numbers to tally, doubling the numbers to tally (and computer memory required) compared to the prior string length. Reducing string size can help keep the data structure creation and performance (e.g., use for later accessing as described below), in terms of computational and storage, reasonable. Second, a statistical consideration to limiting the maximum string length can be to avoid overfitting downstream models that use the string counts. If long strings of CpG sites do not, biologically, have a strong effect on the outcome (e.g., predictions of anomalousness that predictive of the presence of cancer), calculating probabilities based on large strings of CpG sites can be problematic as it uses a significant amount of data that may not be available, and thus can be too sparse for a model to perform appropriately. For example, calculating a probability of anomalousness/cancer conditioned on the prior 100 CpG sites can use counts of strings in the data structure of length 100, ideally some matching exactly the prior 100 methylation states. If only sparse counts of strings of length 100 are available, there can be insufficient data to determine whether a given string of length of 100 in a test sample is anomalous or not.

[0226] FIG. 4B is a flowchart describing a process 420 for identifying anomalously methylated fragments from a sample, according to one or more embodiments. In process 420, the analytics system generates 300 methylation state vectors from cfDNA fragments of the subject. The analytics system can handle each methylation state vector as follows.

[0227] For a given methylation state vector, the analytics system enumerates 430 all possibilities of methylation state vectors having the same starting CpG site and same length (i.e., set of CpG sites) in the methylation state vector. As each methylation state is generally either methylated or unmethylated there can be effectively two possible states at each CpG site, and thus the count of distinct possibilities of methylation state vectors can depend on a power of 2, such that a methylation state vector of length n would be associated with 2ⁿ possibilities of methylation state vectors. With methylation state vectors inclusive of indeterminate states for one or more CpG sites, the analytics system may enumerate 430 possibilities of methylation state vectors considering only CpG sites that have observed states.

[0228] The analytics system calculates 440 the probability of observing each possibility of methylation state vector for the identified starting CpG site and methylation state vector length by accessing the healthy control group data structure. In some embodiments, calculating the probability of observing a given possibility uses a Markov chain probability to model the joint probability calculation. The Markov model can be trained, at least in part, based upon evaluation of a methylation state of each CpG site in the corresponding plurality of CpG sites of the respective fragment (e.g., nucleic acid methylation fragment) across those nucleic acid methylation fragments in a healthy noncancer cohort dataset that have the corresponding plurality of CpG sites. For example, a Markov model (e.g., a Hidden Markov Model or HMI) is used to determine the probability that a sequence of methylation states (comprising, e.g., “M” or “U”) can be observed for a nucleic acid methylation fragment in a plurality of nucleic acid methylation fragments, given a set of probabilities that determine, for each state in the sequence, the likelihood of observing the next state in the sequence. The set of probabilities can be obtained by training the HMI. Such training can involve computing statistical parameters (e.g., the probability that a first state can transition to a second state (the transition probability) and/or the probability that a given methylation state can be observed for a respective CpG site (the emission probability)), given an initial training dataset of observed methylation state sequences (e.g., methylation patterns). HMMs can be trained using supervised training (e.g., using samples where the underlying sequence as well as the observed states are known) and/or unsupervised training (e.g., Viterbi learning, maximum likelihood estimation, expectation-maximization training, and/or Baum-Welch training). In other embodiments, calculation methods other than Markov chain probabilities are used to determine the probability of observing each possibility of methylation state vector. For example, such calculation method can include a learned representation. The p-value threshold can be between 0.01 and 0.10, or between 0.03 and 0.06. The p-value threshold can be 0.05. The p-value threshold can be less than 0.01, less than 0.001, or less than 0.0001.

[0229] The analytics system calculates 450 a p-value score for the methylation state vector using the calculated probabilities for each possibility. In some embodiments, this includes identifying the calculated probability corresponding to the possibility that matches the methylation state vector in question. Specifically, this can be the possibility of having the same set of CpG sites, or similarly the same starting CpG site and length as the methylation state vector. The analytics system can sum the calculated probabilities of any possibilities having probabilities less than or equal to the identified probability to generate the p-value score.

[0230] This p-value can represent the probability of observing the methylation state vector of the fragment or other methylation state vectors even less probable in the healthy control group. A low p-value score can, thereby, generally correspond to a methylation state vector which is rare in a healthy individual, and which causes the fragment to be labeled anomalously methylated, relative to the healthy control group. A high p-value score can generally relate to a methylation state vector is expected to be present, in a relative sense, in a healthy individual. If the healthy control group is a non-cancerous group, for example, a low p-value can indicate that the fragment is anomalous methylated relative to the non-cancer group, and therefore possibly indicative of the presence of cancer in the test subject.

[0231] As above, the analytics system can calculate p-value scores for each of a plurality of methylation state vectors, each representing a cfDNA fragment in the test sample. To identify which of the fragments are anomalously methylated, the analytics system may filter 460 the set of methylation state vectors based on their p-value scores. In some embodiments, filtering is performed by comparing the p-values scores against a threshold and keeping only those fragments below the threshold. This threshold p-value score can be on the order of 0.1, 0.01, 0.001, 0.0001, or similar.

[0232] According to example results from the process 400, the analytics system can yield a median (range) of 2,800 (1,500-12,000) fragments with anomalous methylation patterns for participants without cancer in training, and a median (range) of 3,000 (1,200-420,000) fragments with anomalous methylation patterns for participants with cancer in training. These filtered sets of fragments with anomalous methylation patterns may be used for the downstream analyses as described below in Section III.

[0233] In some embodiments, the analytics system uses 455 a sliding window to determine possibilities of methylation state vectors and calculate p-values. Rather than enumerating possibilities and calculating p-values for entire methylation state vectors, the analytics system can enumerate possibilities and calculates p-values for only a window of sequential CpG sites, where the window is shorter in length (of CpG sites) than at least some fragments (otherwise, the window would serve no purpose). The window length may be static, user determined, dynamic, or otherwise selected.

[0234] In calculating p-values for a methylation state vector larger than the window, the window can identify the sequential set of CpG sites from the vector within the window starting from the first CpG site in the vector. The analytic system can calculate a p-value score for the window including the first CpG site. The analytics system can then “slide” the window to the second CpG site in the vector, and calculates another p-value score for the second window. Thus, for a window size l and methylation vector length m, each methylation state vector can generate m−l+1 p-value scores. After completing the p-value calculations for each portion of the vector, the lowest p-value score from all sliding windows can be taken as the overall p-value score for the methylation state vector. In other embodiments, the analytics system aggregates the p-value scores for the methylation state vectors to generate an overall p-value score.

[0235] Using the sliding window can help to reduce the number of enumerated possibilities of methylation state vectors and their corresponding probability calculations that would otherwise need to be performed. To give a realistic example, it can be for fragments to have upwards of 54 CpG sites. Instead of computing probabilities for 2\hat{ }54 (˜1.8×10\hat{ }16) possibilities to generate a single p-score, the analytics system can instead use a window of size 5 (for example) which results in 50 p-value calculations for each of the 50 windows of the methylation state vector for that fragment. Each of the 50 calculations can enumerate 2\hat{ }5 (32) possibilities of methylation state vectors, which total results in 50×2\hat{ }5 (1.6×10\hat{ }3) probability calculations. This can result in a vast reduction of calculations to be performed, with no meaningful hit to the accurate identification of anomalous fragments.

[0236] In embodiments with indeterminate states, the analytics system may calculate a p-value score summing out CpG sites with indeterminates states in a fragment's methylation state vector. The analytics system can identify all possibilities that have consensus with the all methylation states of the methylation state vector excluding the indeterminate states. The analytics system may assign the probability to the methylation state vector as a sum of the probabilities of the identified possibilities. As an example, the analytics system can calculate a probability of a methylation state vector of <M₁, I₂, U₃> as a sum of the probabilities for the possibilities of methylation state vectors of <M₁, M₂, U₃> and <M₁, U₂, U₃> since methylation states for CpG sites 1 and 3 are observed and in consensus with the fragment's methylation states at CpG sites 1 and 3. This method of summing out CpG sites with indeterminate states can use calculations of probabilities of possibilities up to 2\hat{ }i, wherein i denotes the number of indeterminate states in the methylation state vector. In additional embodiments, a dynamic programming algorithm may be implemented to calculate the probability of a methylation state vector with one or more indeterminate states. Advantageously, the dynamic programming algorithm operates in linear computational time.

[0237] In some embodiments, the computational burden of calculating probabilities and/or p-value scores may be further reduced by caching at least some calculations. For example, the analytic system may cache in transitory or persistent memory calculations of probabilities for possibilities of methylation state vectors (or windows thereof). If other fragments have the same CpG sites, caching the possibility probabilities can allow for efficient calculation of p-score values without needing to re-calculate the underlying possibility probabilities. Equivalently, the analytics system may calculate p-value scores for each of the possibilities of methylation state vectors associated with a set of CpG sites from vector (or window thereof). The analytics system may cache the p-value scores for use in determining the p-value scores of other fragments including the same CpG sites. Generally, the p-value scores of possibilities of methylation state vectors having the same CpG sites may be used to determine the p-value score of a different one of the possibilities from the same set of CpG sites.

[0238] One or more nucleic acid methylation fragments can be filtered prior to training region models or cancer classifier. Filtering nucleic acid methylation fragments can comprise removing, from the corresponding plurality of nucleic acid methylation fragments, each respective nucleic acid methylation fragment that fails to satisfy one or more selection criteria (e.g., below or above one selection criteria). The one or more selection criteria can comprise a p-value threshold. The output p-value of the respective nucleic acid methylation fragment can be determined, at least in part, based upon a comparison of the corresponding methylation pattern of the respective nucleic acid methylation fragment to a corresponding distribution of methylation patterns of those nucleic acid methylation fragments in a healthy noncancer cohort dataset that have the corresponding plurality of CpG sites of the respective nucleic acid methylation fragment.

[0239] Filtering a plurality of nucleic acid methylation fragments can comprise removing each respective nucleic acid methylation fragment that fails to satisfy a p-value threshold. The filter can be applied to the methylation pattern of each respective nucleic acid methylation fragment using the methylation patterns observed across the first plurality of nucleic acid methylation fragments. Each respective methylation pattern of each respective nucleic acid methylation fragment (e.g., Fragment One, . . . , Fragment N) can comprise a corresponding one or more methylation sites (e.g., CpG sites) identified with a methylation site identifier and a corresponding methylation pattern, represented as a sequence of 1's and 0's, where each “1” represents a methylated CpG site in the one or more CpG sites and each “0” represents an unmethylated CpG site in the one or more CpG sites. The methylation patterns observed across the first plurality of nucleic acid methylation fragments can be used to build a methylation state distribution for the CpG site states collectively represented by the first plurality of nucleic acid methylation fragments (e.g., CpG site A, CpG site B, . . . , CpG site ZZZ). Further details regarding processing of nucleic acid methylation fragments are disclosed in U.S. Provisional Patent Application No. 62/985,258, titled “Systems and Methods for Cancer Condition Determination Using Autoencoders,” filed Mar. 4, 2020, which is hereby incorporated herein by reference in its entirety.

[0240] The respective nucleic acid methylation fragment may fail to satisfy a selection criterion in the one or more selection criteria when the respective nucleic acid methylation fragment has an anomalous methylation score that is less than an anomalous methylation score threshold. In this situation, the anomalous methylation score can be determined by a mixture model. For example, a mixture model can detect an anomalous methylation pattern in a nucleic acid methylation fragment by determining the likelihood of a methylation state vector (e.g., a methylation pattern) for the respective nucleic acid methylation fragment based on the number of possible methylation state vectors of the same length and at the same corresponding genomic location. This can be executed by generating a plurality of possible methylation states for vectors of a specified length at each genomic location in a reference genome. Using the plurality of possible methylation states, the number of total possible methylation states and subsequently the probability of each predicted methylation state at the genomic location can be determined. The likelihood of a sample nucleic acid methylation fragment corresponding to a genomic location within the reference genome can then be determined by matching the sample nucleic acid methylation fragment to a predicted (e.g., possible) methylation state and retrieving the calculated probability of the predicted methylation state. An anomalous methylation score can then be calculated based on the probability of the sample nucleic acid methylation fragment.

[0241] The respective nucleic acid methylation fragment can fail to satisfy a selection criterion in the one or more selection criteria when the respective nucleic acid methylation fragment has less than a threshold number of residues. The threshold number of residues can be between 10 and 50, between 50 and 100, between 100 and 150, or more than 150. The threshold number of residues can be a fixed value between 20 and 90. The respective nucleic acid methylation fragment may fail to satisfy a selection criterion in the one or more selection criteria when the respective nucleic acid methylation fragment has less than a threshold number of CpG sites. The threshold number of CpG sites can be 4, 5, 6, 7, 8, 9, or 10. The respective nucleic acid methylation fragment can fail to satisfy a selection criterion in the one or more selection criteria when a genomic start position and a genomic end position of the respective nucleic acid methylation fragment indicates that the respective nucleic acid methylation fragment represents less than a threshold number of nucleotides in a human genome reference sequence.

[0242] The filtering can remove a nucleic acid methylation fragment in the corresponding plurality of nucleic acid methylation fragments that has the same corresponding methylation pattern and the same corresponding genomic start position and genomic end position as another nucleic acid methylation fragment in the corresponding plurality of nucleic acid methylation fragments. This filtering step can remove redundant fragments that are exact duplicates, including, in some instances, PCR duplicates. The filtering can remove a nucleic acid methylation fragment that has the same corresponding genomic start position and genomic end position and less than a threshold number of different methylation states as another nucleic acid methylation fragment in the corresponding plurality of nucleic acid methylation fragments. The threshold number of different methylation states used for retention of a nucleic acid methylation fragment can be 1, 2, 3, 4, 5, or more than 5. For example, a first nucleic acid methylation fragment having the same corresponding genomic start and end position as a second nucleic acid methylation fragment but having at least 1, at least 2, at least 3, at least 4, or at least 5 different methylation states at a respective CpG site (e.g., aligned to a reference genome) is retained. As another example, a first nucleic acid methylation fragment having the same methylation state vector (e.g., methylation pattern) but different corresponding genomic start and end positions as a second nucleic acid methylation fragment is also retained.

[0243] The filtering can remove assay artifacts in the plurality of nucleic acid methylation fragments. The removal of assay artifacts can comprise removing sequence reads obtained from sequenced hybridization probes and/or sequence reads obtained from sequences that failed to undergo conversion during bisulfite conversion. The filtering can remove contaminants (e.g., due to sequencing, nucleic acid isolation, and/or sample preparation).

[0244] The filtering can remove a subset of methylation fragments from the plurality of methylation fragments based on mutual information filtering of the respective methylation fragments against the cancer state across the plurality of training subjects. For example, mutual information can provide a measure of the mutual dependence between two conditions of interest sampled simultaneously. Mutual information can be determined by selecting an independent set of CpG sites (e.g., within all or a portion of a nucleic acid methylation fragment) from one or more datasets and comparing the probability of the methylation states for the set of CpG sites between two sample groups (e.g., subsets and/or groups of genotypic datasets, biological samples, and/or subjects). A mutual information score can denote the probability of the methylation pattern for a first condition versus a second condition at the respective region in the respective frame of the sliding window, thus indicating the discriminative power of the respective region. A mutual information score can be similarly calculated for each region in each frame of the sliding window as it progresses across the selected sets of CpG sites and/or the selected genomic regions. Further details regarding mutual information filtering are disclosed in U.S. patent application Ser. No. 17/119,606, titled “Cancer Classification using Patch Convolutional Neural Networks,” filed Dec. 11, 2020, which is hereby incorporated herein by reference in its entirety.

### II.C.ii. Hypermethylated Fragments and Hypomethylated Fragments

[0245] In some embodiments, the analytics system determines anomalous fragments as fragments with over a threshold number of CpG sites and either with over a threshold percentage of the CpG sites methylated or with over a threshold percentage of CpG sites unmethylated; the analytics system identifies such fragments as hypermethylated fragments or hypomethylated fragments. Example thresholds for length of fragments (or CpG sites) include more than 3, 4, 5, 6, 7, 8, 9, 10, etc. Example percentage thresholds of methylation or unmethylation include more than 80%, 85%, 90%, or 95%, or any other percentage within the range of 50%-100%.

### II.D. Example Analytics System

[0246] FIG. 6A is an exemplary flowchart of devices for sequencing nucleic acid samples according to one or more embodiments. This illustrative flowchart includes devices such as a sequencer 620 and an analytics system 600. The sequencer 620 and the analytics system 600 may work in tandem to perform one or more steps in the processes 300 of FIG. 3A, 400 of FIG. 4A, 420 of FIG. 4B, and other processes described herein.

[0247] In various embodiments, the sequencer 620 receives an enriched nucleic acid sample 610. As shown in FIG. 6A, the sequencer 620 can include a graphical user interface 625 that enables user interactions with particular tasks (e.g., initiate sequencing or terminate sequencing) as well as one more loading stations 630 for loading a sequencing cartridge including the enriched fragment samples and/or for loading necessary buffers for performing the sequencing assays. Therefore, once a user of the sequencer 620 has provided the necessary reagents and sequencing cartridge to the loading station 630 of the sequencer 620, the user can initiate sequencing by interacting with the graphical user interface 625 of the sequencer 620. Once initiated, the sequencer 620 performs the sequencing and outputs the sequence reads of the enriched fragments from the nucleic acid sample 610.

[0248] In some embodiments, the sequencer 620 is communicatively coupled with the analytics system 600. The analytics system 600 includes some number of computing devices used for processing the sequence reads for various applications such as assessing methylation status at one or more CpG sites, variant calling or quality control. The sequencer 620 may provide the sequence reads in a BAM file format to the analytics system 600. The analytics system 600 can be communicatively coupled to the sequencer 620 through a wireless, wired, or a combination of wireless and wired communication technologies. Generally, the analytics system 600 is configured with a processor and non-transitory computer-readable storage medium storing computer instructions that, when executed by the processor, cause the processor to process the sequence reads or to perform one or more steps of any of the methods or processes disclosed herein.

[0249] In some embodiments, the sequence reads may be aligned to a reference genome using known methods in the art to determine alignment position information, e.g., via step 340 of the process 300 in FIG. 3A. Alignment position may generally describe a beginning position and an end position of a region in the reference genome that corresponds to a beginning nucleotide based and an end nucleotide base of a given sequence read. Corresponding to methylation sequencing, the alignment position information may be generalized to indicate a first CpG site and a last CpG site included in the sequence read according to the alignment to the reference genome. The alignment position information may further indicate methylation statuses and locations of all CpG sites in a given sequence read. A region in the reference genome may be associated with a gene or a segment of a gene; as such, the analytics system 600 may label a sequence read with one or more genes that align to the sequence read. In one embodiment, fragment length (or size) is be determined from the beginning and end positions.

[0250] In various embodiments, for example when a paired-end sequencing process is used, a sequence read is comprised of a read pair denoted as R_1 and R_2. For example, the first read R_1 may be sequenced from a first end of a double-stranded DNA (dsDNA) molecule whereas the second read R_2 may be sequenced from the second end of the double-stranded DNA (dsDNA). Therefore, nucleotide base pairs of the first read R_1 and second read R_2 may be aligned consistently (e.g., in opposite orientations) with nucleotide bases of the reference genome. Alignment position information derived from the read pair R_1 and R_2 may include a beginning position in the reference genome that corresponds to an end of a first read (e.g., R_1) and an end position in the reference genome that corresponds to an end of a second read (e.g., R_2). In other words, the beginning position and end position in the reference genome can represent the likely location within the reference genome to which the nucleic acid fragment corresponds. An output file having SAM (sequence alignment map) format or BAM (binary) format may be generated and output for further analysis.

[0251] Referring now to FIG. 6B, FIG. 6B is a block diagram of an analytics system 600 for processing DNA samples according to one embodiment. The analytics system implements one or more computing devices for use in analyzing DNA samples. The analytics system 600 includes a sequence processor 640, sequence database 645, model database 655, models 650, parameter database 665, and score engine 660. In some embodiments, the analytics system 600 performs some or all of the processes 300 of FIG. 3A and 400 of FIG. 4A.

[0252] The sequence processor 640 generates methylation state vectors for fragments from a sample. At each CpG site on a fragment, the sequence processor 640 generates a methylation state vector for each fragment specifying a location of the fragment in the reference genome, a number of CpG sites in the fragment, and the methylation state of each CpG site in the fragment whether methylated, unmethylated, or indeterminate via the process 300 of FIG. 3A. The sequence processor 640 may store methylation state vectors for fragments in the sequence database 645. Data in the sequence database 645 may be organized such that the methylation state vectors from a sample are associated to one another.

[0253] Further, multiple different models 650 may be stored in the model database 655 or retrieved for use with test samples. In one example, a model is a trained cancer classifier for determining a cancer prediction for a test sample using a feature vector derived from anomalous fragments. The training and use of the cancer classifier will be further discussed in conjunction with Section III. Cancer Classifier for Determining Cancer. The analytics system 600 may train the one or more models 650 and store various trained parameters in the parameter database 665. The analytics system 600 stores the models 650 along with functions in the model database 655.

[0254] During inference, the score engine 660 uses the one or more models 650 to return outputs. The score engine 660 accesses the models 650 in the model database 655 along with trained parameters from the parameter database 665. According to each model, the score engine receives an appropriate input for the model and calculates an output based on the received input, the parameters, and a function of each model relating the input and the output. In some use cases, the score engine 660 further calculates metrics correlating to a confidence in the calculated outputs from the model. In other use cases, the score engine 660 calculates other intermediary values for use in the model.

### III. Cancer Classifier for Determining Cancer

### III. A. Overview

[0255] The cancer classifier can be trained to receive a feature vector for a test sample and determine whether the test sample is from a test subject that has cancer or, more specifically, a particular cancer type. The cancer classifier can comprise a plurality of classification parameters and a function representing a relation between the feature vector as input and the cancer prediction as output determined by the function operating on the input feature vector with the classification parameters. In some embodiments, the feature vectors input into the cancer classifier are based on a set of anomalous fragments determined from the test sample. The anomalous fragments may be determined via the process 420 in FIG. 4B, or more specifically hypermethylated and hypomethylated fragments as determined via the step 470 of the process 420, or anomalous fragments determined according to some other process. Prior to deployment of the cancer classifier, the analytics system can train the cancer classifier.

### III.B. Training of Cancer Classifier

[0256] FIG. 5A is a flowchart describing a process 500 of training a cancer classifier, according to an embodiment. The analytics system obtains 510 a plurality of training samples each having a set of anomalous fragments and a label of a cancer type. The plurality of training samples can include any combination of samples from healthy individuals with a general label of “non-cancer,” samples from subjects with a general label of “cancer” or a specific label (e.g., “breast cancer,” “lung cancer,” etc.). The training samples from subjects for one cancer type may be termed a cohort for that cancer type or a cancer type cohort. The analytics system may ensure that the training samples used in training of the cancer classifier are not contaminated. To determine whether the training samples are contaminated, the analytics system may perform the process 100 in FIG. 1.

[0257] The analytics system determines 520, for each training sample, a feature vector based on the set of anomalous fragments of the training sample. The analytics system can calculate an anomaly score for each CpG site in an initial set of CpG sites. The initial set of CpG sites may be all CpG sites in the human genome or some portion thereof—which may be on the order of 10⁴, 10⁵, 10⁶, 10⁷, 10⁸, etc. In one embodiment, the analytics system defines the anomaly score for the feature vector with a binary scoring based on whether there is an anomalous fragment in the set of anomalous fragments that encompasses the CpG site. In another embodiment, the analytics system defines the anomaly score based on a count of anomalous fragments overlapping the CpG site. In one example, the analytics system may use a trinary scoring assigning a first score for lack of presence of anomalous fragments, a second score for presence of a few anomalous fragments, and a third score for presence of more than a few anomalous fragments. For example, the analytics system counts 5 anomalous fragments in a sample that overlap the CpG site and calculates an anomaly score based on the count of 5.

[0258] Once all anomaly scores are determined for a training sample, the analytics system can determine the feature vector as a vector of elements including, for each element, one of the anomaly scores associated with one of the CpG sites in an initial set. The analytics system can normalize the anomaly scores of the feature vector based on a coverage of the sample. Here, coverage can refer to a median or average sequencing depth over all CpG sites covered by the initial set of CpG sites used in the classifier, or based on the set of anomalous fragments for a given training sample.

[0259] As an example, reference is now made to FIG. 5B illustrating a matrix of training feature vectors 522. In this example, the analytics system has identified CpG sites [K] 526 for consideration in generating feature vectors for the cancer classifier. The analytics system selects training samples [N] 524. The analytics system determines a first anomaly score 528 for a first arbitrary CpG site [k1] to be used in the feature vector for a training sample [n1]. The analytics system checks each anomalous fragment in the set of anomalous fragments. If the analytics system identifies at least one anomalous fragment that includes the first CpG site, then the analytics system determines the first anomaly score 528 for the first CpG site as 1, as illustrated in FIG. 5B. Considering a second arbitrary CpG site [k2], the analytics system similarly checks the set of anomalous fragments for at least one that includes the second CpG site [k2]. If the analytics system does not find any such anomalous fragment that includes the second CpG site, the analytics system determines a second anomaly score 529 for the second CpG site [k2] to be 0, as illustrated in FIG. 5B. Once the analytics system determines all the anomaly scores for the initial set of CpG sites, the analytics system determines the feature vector for the first training sample [n1] including the anomaly scores with the feature vector including the first anomaly score 528 of 1 for the first CpG site [k1] and the second anomaly score 529 of 0 for the second CpG site [k2] and subsequent anomaly scores, thus forming a feature vector [1, 0, . . . ].

[0260] Additional approaches to featurization of a sample can be found in: U.S. application Ser. No. 15/931,022 entitled “Model-Based Featurization and Classification;” U.S. application Ser. No. 16/579,805 entitled “Mixture Model for Targeted Sequencing;” U.S. application Ser. No. 16/352,602 entitled “Anomalous Fragment Detection and Classification;” and U.S. application Ser. No. 16/723,716 entitled “Source of Origin Deconvolution Based on Methylation Fragments in Cell-Free DNA Samples;” all of which are incorporated by reference in their entirety.

[0261] The analytics system may further limit the CpG sites considered for use in the cancer classifier. The analytics system computes 530, for each CpG site in the initial set of CpG sites, an information gain based on the feature vectors of the training samples. From step 520, each training sample has a feature vector that may contain an anomaly score of all CpG sites in the initial set of CpG sites which could include up to all CpG sites in the human genome. However, some CpG sites in the initial set of CpG sites may not be as informative as others in distinguishing between cancer types, or may be duplicative with other CpG sites.

[0262] In one embodiment, the analytics system computes 530 an information gain for each cancer type and for each CpG site in the initial set to determine whether to include that CpG site in the classifier. The information gain is computed for training samples with a given cancer type compared to all other samples. For example, two random variables ‘anomalous fragment’ (‘AF’) and ‘cancer type’ (CT′) are used. In one embodiment, AF is a binary variable indicating whether there is an anomalous fragment overlapping a given CpG site in a given samples as determined for the anomaly score/feature vector above. CT is a random variable indicating whether the cancer is of a particular type. The analytics system computes the mutual information with respect to CT given AF. That is, how many bits of information about the cancer type are gained if it is known whether there is an anomalous fragment overlapping a particular CpG site. In practice, for a first cancer type, the analytics system computes pairwise mutual information gain against each other cancer type and sums the mutual information gain across all the other cancer types.

[0263] For a given cancer type, the analytics system can use this information to rank CpG sites based on how cancer specific they are. This procedure can be repeated for all cancer types under consideration. If a particular region is commonly anomalously methylated in training samples of a given cancer but not in training samples of other cancer types or in healthy training samples, then CpG sites overlapped by those anomalous fragments can have high information gains for the given cancer type. The ranked CpG sites for each cancer type can be greedily added (selected) 540 to a selected set of CpG sites based on their rank for use in the cancer classifier.

[0264] In additional embodiments, the analytics system may consider other selection criteria for selecting informative CpG sites to be used in the cancer classifier. One selection criterion may be that the selected CpG sites are above a threshold separation from other selected CpG sites. For example, the selected CpG sites are to be over a threshold number of base pairs away from any other selected CpG site (e.g., 100 base pairs), such that CpG sites that are within the threshold separation are not both selected for consideration in the cancer classifier.

[0265] In one embodiment, according to the selected set of CpG sites from the initial set, the analytics system may modify 550 the feature vectors of the training samples as needed. For example, the analytics system may truncate feature vectors to remove anomaly scores corresponding to CpG sites not in the selected set of CpG sites.

[0266] With the feature vectors of the training samples, the analytics system may train the cancer classifier in any of a number of ways. The feature vectors may correspond to the initial set of CpG sites from step 520 or to the selected set of CpG sites from step 550. In one embodiment, the analytics system trains 560 a binary cancer classifier to distinguish between cancer and non-cancer based on the feature vectors of the training samples. In this manner, the analytics system uses training samples that include both non-cancer samples from healthy individuals and cancer samples from subjects. Each training sample can have one of the two labels “cancer” or “non-cancer.” In this embodiment, the classifier outputs a cancer prediction indicating the likelihood of the presence or absence of cancer.

[0267] In another embodiment, the analytics system trains 570 a multiclass cancer classifier to distinguish between many cancer types (also referred to as tissue of origin (TOO) labels). Cancer types can include one or more cancers and may include a non-cancer type (may also include any additional other diseases or genetic disorders, etc.). To do so, the analytics system can use the cancer type cohorts and may also include or not include a non-cancer type cohort. In this multi-cancer embodiment, the cancer classifier is trained to determine a cancer prediction (or, more specifically, a TOO prediction) that comprises a prediction value for each of the cancer types being classified for. The prediction values may correspond to a likelihood that a given training sample (and during inference, a test sample) has each of the cancer types. In one implementation, the prediction values are scored between 0 and 100, wherein the cumulation of the prediction values equals 100. For example, the cancer classifier returns a cancer prediction including a prediction value for breast cancer, lung cancer, and non-cancer. For example, the classifier can return a cancer prediction that a test sample is 65% likelihood of breast cancer, 25% likelihood of lung cancer, and 10% likelihood of non-cancer. The analytics system may further evaluate the prediction values to generate a prediction of a presence of one or more cancers in the sample, also may be referred to as a TOO prediction indicating one or more TOO labels, e.g., a first TOO label with the highest prediction value, a second TOO label with the second highest prediction value, etc. Continuing with the example above and given the percentages, in this example the system may determine that the sample has breast cancer given that breast cancer has the highest likelihood.

[0268] In both embodiments, the analytics system trains the cancer classifier by inputting sets of training samples with their feature vectors into the cancer classifier and adjusting classification parameters so that a function of the classifier accurately relates the training feature vectors to their corresponding label. The analytics system may group the training samples into sets of one or more training samples for iterative batch training of the cancer classifier. After inputting all sets of training samples including their training feature vectors and adjusting the classification parameters, the cancer classifier can be sufficiently trained to label test samples according to their feature vector within some margin of error. The analytics system may train the cancer classifier according to any one of a number of methods. As an example, the binary cancer classifier may be a L2-regularized logistic regression classifier that is trained using a log-loss function. As another example, the multi-cancer classifier may be a multinomial logistic regression. In practice either type of cancer classifier may be trained using other techniques. These techniques are numerous including potential use of kernel methods, random forest classifier, a mixture model, an autoencoder model, machine learning algorithms such as multilayer neural networks, etc.

[0269] The classifier can include a logistic regression algorithm, a neural network algorithm, a support vector machine algorithm, a Naive Bayes algorithm, a nearest neighbor algorithm, a boosted trees algorithm, a random forest algorithm, a decision tree algorithm, a multinomial logistic regression algorithm, a linear model, or a linear regression algorithm.

### III.C. Deployment of Cancer Classifier

[0270] During use of the cancer classifier, the analytics system can obtain a test sample from a subject of unknown cancer type. The analytics system may process the test sample comprised of DNA molecules with any combination of the processes 300, 400, and 420 to achieve a set of anomalous fragments. The analytics system can determine a test feature vector for use by the cancer classifier according to similar principles discussed in the process 500. The analytics system can calculate an anomaly score for each CpG site in a plurality of CpG sites in use by the cancer classifier. For example, the cancer classifier receives as input feature vectors inclusive of anomaly scores for 1,000 selected CpG sites. The analytics system can thus determine a test feature vector inclusive of anomaly scores for the 1,000 selected CpG sites based on the set of anomalous fragments. The analytics system can calculate the anomaly scores in a same manner as the training samples. In some embodiments, the analytics system defines the anomaly score as a binary score based on whether there is a hypermethylated or hypomethylated fragment in the set of anomalous fragments that encompasses the CpG site.

[0271] The analytics system can then input the test feature vector into the cancer classifier. The function of the cancer classifier can then generate a cancer prediction based on the classification parameters trained in the process 500 and the test feature vector. In the first manner, the cancer prediction can be binary and selected from a group consisting of “cancer” or non-cancer;” in the second manner, the cancer prediction is selected from a group of many cancer types and “non-cancer.” In additional embodiments, the cancer prediction has predictions values for each of the many cancer types. Moreover, the analytics system may determine that the test sample is most likely to be of one of the cancer types. Following the example above with the cancer prediction for a test sample as 65% likelihood of breast cancer, 25% likelihood of lung cancer, and 10% likelihood of non-cancer, the analytics system may determine that the test sample is most likely to have breast cancer. In another example, where the cancer prediction is binary as 60% likelihood of non-cancer and 40% likelihood of cancer, the analytics system determines that the test sample is most likely not to have cancer. In additional embodiments, the cancer prediction with the highest likelihood may still be compared against a threshold (e.g., 40%, 50%, 60%, 70%) in order to call the test subject as having that cancer type. If the cancer prediction with the highest likelihood does not surpass that threshold, the analytics system may return an inconclusive result.

[0272] In additional embodiments, the analytics system chains a cancer classifier trained in step 560 of the process 500 with another cancer classifier trained in step 570 or the process 500. The analytics system can input the test feature vector into the cancer classifier trained as a binary classifier in step 560 of the process 500. The analytics system can receive an output of a cancer prediction. The cancer prediction may be binary as to whether the test subject likely has or likely does not have cancer. In other implementations, the cancer prediction includes prediction values that describe likelihood of cancer and likelihood of non-cancer. For example, the cancer prediction has a cancer prediction value of 85% and the non-cancer prediction value of 15%. The analytics system may determine the test subject to likely have cancer. Once the analytics system determines a test subject is likely to have cancer, the analytics system may input the test feature vector into a multiclass cancer classifier trained to distinguish between different cancer types. The multiclass cancer classifier can receive the test feature vector and returns a cancer prediction of a cancer type of the plurality of cancer types. For example, the multiclass cancer classifier provides a cancer prediction specifying that the test subject is most likely to have ovarian cancer. In another implementation, the multiclass cancer classifier provides a prediction value for each cancer type of the plurality of cancer types. For example, a cancer prediction may include a breast cancer type prediction value of 40%, a colorectal cancer type prediction value of 15%, and a liver cancer prediction value of 45%.

[0273] According to generalized embodiment of binary cancer classification, the analytics system can determine a cancer score for a test sample based on the test sample's sequencing data (e.g., methylation sequencing data, SNP sequencing data, other DNA sequencing data, RNA sequencing data, etc.). The analytics system can compare the cancer score for the test sample against a binary threshold cutoff for predicting whether the test sample likely has cancer. The binary threshold cutoff can be tuned using TOO thresholding based on one or more TOO subtype classes. The analytics system may further generate a feature vector for the test sample for use in the multiclass cancer classifier to determine a cancer prediction indicating one or more likely cancer types.

[0274] The classifier may be used to determine the disease state of a test subject, e.g., a subject whose disease status is unknown. The method can include obtaining a test genomic data construct (e.g., single time point test data), in electronic form, that includes a value for each genomic characteristic in the plurality of genomic characteristics of a corresponding plurality of nucleic acid fragments in a biological sample obtained from a test subject. The method can then include applying the test genomic data construct to the test classifier to thereby determine the state of the disease condition in the test subject. The test subject may not be previously diagnosed with the disease condition.

[0275] The classifier can be a temporal classifier that uses at least (i) a first test genomic data construct generated from a first biological sample acquired from a test subject at a first point in time, and (ii) a second test genomic data construct generated from a second biological sample acquired from a test subject at a second point in time.

[0276] The trained classifier can be used to determine the disease state of a test subject, e.g., a subject whose disease status is unknown. In this case, the method can include obtaining a test time-series data set, in electronic form, for a test subject, where the test time-series data set includes, for each respective time point in a plurality of time points, a corresponding test genotypic data construct including values for the plurality of genotypic characteristics of a corresponding plurality of nucleic acid fragments in a corresponding biological sample obtained from the test subject at the respective time point, and for each respective pair of consecutive time points in the plurality of time points, an indication of the length of time between the respective pair of consecutive time points. The method can then include applying the test genotypic data construct to the test classifier to thereby determine the state of the disease condition in the test subject. The test subject may not be previously diagnosed with the disease condition.

### IV. Applications

[0277] In some embodiments, the methods, analytic systems and/or classifier of the present invention can be used to detect the presence of cancer, monitor cancer progression or recurrence, monitor therapeutic response or effectiveness, determine a presence or monitor minimum residual disease (MRD), or any combination thereof. For example, as described herein, a classifier can be used to generate a probability score (e.g., from 0 to 100) describing a likelihood that a test feature vector is from a subject with cancer. In some embodiments, the probability score is compared to a threshold probability to determine whether or not the subject has cancer. In other embodiments, the likelihood or probability score can be assessed at multiple different time points (e.g., before or after treatment) to monitor disease progression or to monitor treatment effectiveness (e.g., therapeutic efficacy). In still other embodiments, the likelihood or probability score can be used to make or influence a clinical decision (e.g., diagnosis of cancer, treatment selection, assessment of treatment effectiveness, etc.). For example, in one embodiment, if the probability score exceeds a threshold, a physician can prescribe an appropriate treatment.

### IV.A. Early Detection of Cancer

[0278] In some embodiments, the methods and/or classifier of the present invention are used to detect the presence or absence of cancer in a subject suspected of having cancer. For example, a classifier (e.g., as described above in Section III and exampled in Section V) can be used to determine a cancer prediction describing a likelihood that a test feature vector is from a subject that has cancer.

[0279] In one embodiment, a cancer prediction is a likelihood (e.g., scored between 0 and 100) for whether the test sample has cancer (i.e. binary classification). Thus, the analytics system may determine a threshold for determining whether a test subject has cancer. For example, a cancer prediction of greater than or equal to 60 can indicate that the subject has cancer. In still other embodiments, a cancer prediction greater than or equal to 65, greater than or equal to 70, greater than or equal to 75, greater than or equal to 80, greater than or equal to 85, greater than or equal to 90, or greater than or equal to 95 indicates that the subject has cancer. In other embodiments, the cancer prediction can indicate the severity of disease. For example, a cancer prediction of 80 may indicate a more severe form, or later stage, of cancer compared to a cancer prediction below 80 (e.g., a probability score of 70). Similarly, an increase in the cancer prediction over time (e.g., determined by classifying test feature vectors from multiple samples from the same subject taken at two or more time points) can indicate disease progression or a decrease in the cancer prediction over time can indicate successful treatment.

[0280] In another embodiment, a cancer prediction comprises many prediction values, wherein each of a plurality of cancer types being classified (i.e. multiclass classification) for has a prediction value (e.g., scored between 0 and 100). The prediction values may correspond to a likelihood that a given training sample (and during inference, training sample) has each of the cancer types. The analytics system may identify the cancer type that has the highest prediction value and indicate that the test subject likely has that cancer type. In other embodiments, the analytics system further compares the highest prediction value to a threshold value (e.g., 50, 55, 60, 65, 70, 75, 80, 85, etc.) to determine that the test subject likely has that cancer type. In other embodiments, a prediction value can also indicate the severity of disease. For example, a prediction value greater than 80 may indicate a more severe form, or later stage, of cancer compared to a prediction value of 60. Similarly, an increase in the prediction value over time (e.g., determined by classifying test feature vectors from multiple samples from the same subject taken at two or more time points) can indicate disease progression or a decrease in the prediction value over time can indicate successful treatment.

[0281] According to aspects of the invention, the methods and systems of the present invention can be trained to detect or classify multiple cancer indications. For example, the methods, systems and classifiers of the present invention can be used to detect the presence of one or more, two or more, three or more, five or more, ten or more, fifteen or more, or twenty or more different types of cancer.

[0282] Examples of cancers that can be detected using the methods, systems and classifiers of the present invention include carcinoma, lymphoma, blastoma, sarcoma, and leukemia or lymphoid malignancies. More particular examples of such cancers include, but are not limited to, squamous cell cancer (e.g., epithelial squamous cell cancer), skin carcinoma, melanoma, lung cancer, including small-cell lung cancer, non-small cell lung cancer (“NSCLC”), adenocarcinoma of the lung and squamous carcinoma of the lung, cancer of the peritoneum, gastric or stomach cancer including gastrointestinal cancer, pancreatic cancer (e.g., pancreatic ductal adenocarcinoma), cervical cancer, ovarian cancer (e.g., high grade serous ovarian carcinoma), liver cancer (e.g., hepatocellular carcinoma (HCC)), hepatoma, hepatic carcinoma, bladder cancer (e.g., urothelial bladder cancer), testicular (germ cell tumor) cancer, breast cancer (e.g., HER2 positive, HER2 negative, and triple negative breast cancer), brain cancer (e.g., astrocytoma, glioma (e.g., glioblastoma)), colon cancer, rectal cancer, colorectal cancer, endometrial or uterine carcinoma, salivary gland carcinoma, kidney or renal cancer (e.g., renal cell carcinoma, nephroblastoma or Wilms' tumor), prostate cancer, vulval cancer, thyroid cancer, anal carcinoma, penile carcinoma, head and neck cancer, esophageal carcinoma, and nasopharyngeal carcinoma (NPC). Additional examples of cancers include, without limitation, retinoblastoma, thecoma, arrhenoblastoma, hematological malignancies, including but not limited to non-Hodgkin's lymphoma (NHL), multiple myeloma and acute hematological malignancies, endometriosis, fibrosarcoma, choriocarcinoma, laryngeal carcinomas, Kaposi's sarcoma, Schwannoma, oligodendroglioma, neuroblastomas, rhabdomyosarcoma, osteogenic sarcoma, leiomyosarcoma, and urinary tract carcinomas.

[0283] In some embodiments, the cancer is one or more of anorectal cancer, bladder cancer, breast cancer, cervical cancer, colorectal cancer, esophageal cancer, gastric cancer, head & neck cancer, hepatobiliary cancer, leukemia, lung cancer, lymphoma, melanoma, multiple myeloma, ovarian cancer, pancreatic cancer, prostate cancer, renal cancer, thyroid cancer, uterine cancer, or any combination thereof.

[0284] In some embodiments, the one or more cancer can be a “high-signal” cancer (defined as cancers with greater than 50% 5-year cancer-specific mortality), such as anorectal, colorectal, esophageal, head & neck, hepatobiliary, lung, ovarian, and pancreatic cancers, as well as lymphoma and multiple myeloma. High-signal cancers tend to be more aggressive and typically have an above-average cell-free nucleic acid concentration in test samples obtained from a patient.

### IV.B. Cancer and Treatment Monitoring

[0285] In some embodiments, the cancer prediction can be assessed at multiple different time points (e.g., or before or after treatment) to monitor disease progression or to monitor treatment effectiveness (e.g., therapeutic efficacy). For example, the present invention include methods that involve obtaining a first sample (e.g., a first plasma cfDNA sample) from a cancer patient at a first time point, determining a first cancer prediction therefrom (as described herein), obtaining a second test sample (e.g., a second plasma cfDNA sample) from the cancer patient at a second time point, and determining a second cancer prediction therefrom (as described herein).

[0286] In certain embodiments, the first time point is before a cancer treatment (e.g., before a resection surgery or a therapeutic intervention), and the second time point is after a cancer treatment (e.g., after a resection surgery or therapeutic intervention), and the classifier is utilized to monitor the effectiveness of the treatment. For example, if the second cancer prediction decreases compared to the first cancer prediction, then the treatment is considered to have been successful. However, if the second cancer prediction increases compared to the first cancer prediction, then the treatment is considered to have not been successful. In other embodiments, both the first and second time points are before a cancer treatment (e.g., before a resection surgery or a therapeutic intervention). In still other embodiments, both the first and the second time points are after a cancer treatment (e.g., after a resection surgery or a therapeutic intervention). In still other embodiments, cfDNA samples may be obtained from a cancer patient at a first and second time point and analyzed. e.g., to monitor cancer progression, to determine if a cancer is in remission (e.g., after treatment), to monitor or detect residual disease or recurrence of disease, or to monitor treatment (e.g., therapeutic) efficacy.

[0287] Those of skill in the art will readily appreciate that test samples can be obtained from a cancer patient over any desired set of time points and analyzed in accordance with the methods of the invention to monitor a cancer state in the patient. In some embodiments, the first and second time points are separated by an amount of time that ranges from about 15 minutes up to about 30 years, such as about 30 minutes, such as about 1, 2, 3, 4, 5, 6, 7, 8, 9, 10, 11, 12, 13, 14, 15, 16, 17, 18, 19, 20, 21, 22, 23, or about 24 hours, such as about 1, 2, 3, 4, 5, 10, 15, 20, 25 or about 50 days, or such as about 1, 2, 3, 4, 5, 6, 7, 8, 9, 10, 11, or 12 months, or such as about 1, 1.5, 2, 2.5, 3, 3.5, 4, 4.5, 5, 5.5, 6, 6.5, 7, 7.5, 8, 8.5, 9, 9.5, 10, 10.5, 11, 11.5, 12, 12.5, 13, 13.5, 14, 14.5, 15, 15.5, 16, 16.5, 17, 17.5, 18, 18.5, 19, 19.5, 20, 20.5, 21, 21.5, 22, 22.5, 23, 23.5, 24, 24.5, 25, 25.5, 26, 26.5, 27, 27.5, 28, 28.5, 29, 29.5 or about 30 years. In other embodiments, test samples can be obtained from the patient at least once every 5 months, at least once every 6 months, at least once a year, at least once every 2 years, at least once every 3 years, at least once every 4 years, or at least once every 5 years.

### IV.C. Treatment

[0288] In still another embodiment, the cancer prediction can be used to make or influence a clinical decision (e.g., diagnosis of cancer, treatment selection, assessment of treatment effectiveness, etc.). For example, in one embodiment, if the cancer prediction (e.g., for cancer or for a particular cancer type) exceeds a threshold, a physician can prescribe an appropriate treatment (e.g., a resection surgery, radiation therapy, chemotherapy, and/or immunotherapy).

[0289] A classifier (as described herein) can be used to determine a cancer prediction that a sample feature vector is from a subject that has cancer. In one embodiment, an appropriate treatment (e.g., resection surgery or therapeutic) is prescribed when the cancer prediction exceeds a threshold. For example, in one embodiment, if the cancer prediction is greater than or equal to 60 one or more appropriate treatments are prescribed. In another embodiment, if the cancer prediction is greater than or equal to 65, greater than or equal to 70, greater than or equal to 75, greater than or equal to 80, greater than or equal to 85, greater than or equal to 90, or greater than or equal to 95, one or more appropriate treatments are prescribed. In other embodiments, the cancer prediction can indicate the severity of disease. An appropriate treatment matching the severity of the disease may then be prescribed.

[0290] In some embodiments, the treatment is one or more cancer therapeutic agents selected from the group consisting of a chemotherapy agent, a targeted cancer therapy agent, a differentiating therapy agent, a hormone therapy agent, and an immunotherapy agent. For example, the treatment can be one or more chemotherapy agents selected from the group consisting of alkylating agents, antimetabolites, anthracyclines, anti-tumor antibiotics, cytoskeletal disruptors (taxans), topoisomerase inhibitors, mitotic inhibitors, corticosteroids, kinase inhibitors, nucleotide analogs, platinum-based agents and any combination thereof. In some embodiments, the treatment is one or more targeted cancer therapy agents selected from the group consisting of signal transduction inhibitors (e.g. tyrosine kinase and growth factor receptor inhibitors), histone deacetylase (HDAC) inhibitors, retinoic receptor agonists, proteosome inhibitors, angiogenesis inhibitors, and monoclonal antibody conjugates. In some embodiments, the treatment is one or more differentiating therapy agents including retinoids, such as tretinoin, alitretinoin and bexarotene. In some embodiments, the treatment is one or more hormone therapy agents selected from the group consisting of anti-estrogens, aromatase inhibitors, progestins, estrogens, anti-androgens, and GnRH agonists or analogs. In one embodiment, the treatment is one or more immunotherapy agents selected from the group comprising monoclonal antibody therapies such as rituximab (RITUXAN) and alemtuzumab (CAMPATH), non-specific immunotherapies and adjuvants, such as BCG, interleukin-2 (IL-2), and interferon-alfa, immunomodulating drugs, for instance, thalidomide and lenalidomide (REVLIMID). It is within the capabilities of a skilled physician or oncologist to select an appropriate cancer therapeutic agent based on characteristics such as the type of tumor, cancer stage, previous exposure to cancer treatment or therapeutic agent, and other characteristics of the cancer.

### V. Kit Implementation

[0291] Also disclosed herein are kits for performing the methods described above including the methods relating to the cancer classifier. The kits may include one or more collection vessels for collecting a sample from the individual comprising genetic material. The sample can include blood, plasma, serum, urine, fecal, saliva, other types of bodily fluids, or any combination thereof. Such kits can include reagents for isolating nucleic acids from the sample. The reagents can further include reagents for sequencing the nucleic acids including buffers and detection agents. In one or more embodiments, the kits may include one or more sequencing panels comprising probes for targeting particular genomic regions, particular mutations, particular genetic variants, or some combination thereof. In one or more embodiments, the kit comprises at least one panel comprising contamination targeting probes, e.g., from Table 2, Table 4, or some combination thereof. In other embodiments, samples collected via the kit are provided to a sequencing laboratory that may use the sequencing panels to sequence the nucleic acids in the sample.

[0292] A kit can further include instructions for use of the reagents included in the kit. For example, a kit can include instructions for collecting the sample, extracting the nucleic acid from the test sample. Example instructions can be the order in which reagents are to be added, centrifugal speeds to be used to isolate nucleic acids from the test sample, how to amplify nucleic acids, how to sequence nucleic acids, or any combination thereof. The instructions may further illuminate how to operate a computing device as the analytics system 200, for the purposes of performing the steps of any of the methods described.

[0293] In addition to the above components, the kit may include computer-readable storage media storing computer software for performing the various methods described throughout the disclosure. One form in which these instructions can be present is as printed information on a suitable medium or substrate, e.g., a piece or pieces of paper on which the information is printed, in the packaging of the kit, in a package insert. Yet another means would be a computer readable medium, e.g., diskette, CD, hard-drive, network data storage, on which the instructions have been stored in the form of computer code. Yet another means that can be present is a website address which can be used via the internet to access the information at a removed site.

### VI. Example Results

### VI.A. Sample Collection and Processing

[0294] Study design and samples: CCGA (NCT02889978) is a prospective, multi-center, case-control, observational study with longitudinal follow-up. De-identified biospecimens were collected from approximately 15,000 participants from 342 sites. Samples were divided into training (1,785) and test (1,015) sets; samples were selected to ensure a prespecified distribution of cancer types and non-cancers across sites in each cohort, and cancer and non-cancer samples were frequency age-matched by gender.

[0295] Whole-genome bisulfite sequencing: cfDNA was isolated from plasma, and whole-genome bisulfite sequencing (WGBS; 30× depth) was employed for analysis of cfDNA. cfDNA was extracted from two tubes of plasma (up to a combined volume of 10 ml) per patient using a modified QIAamp Circulating Nucleic Acid kit (Qiagen; Germantown, Md.). Up to 75 ng of plasma cfDNA was subjected to bisulfite conversion using the EZ-96 DNA Methylation Kit (Zymo Research, D5003). Converted cfDNA was used to prepare dual indexed sequencing libraries using Accel-NGS Methyl-Seq DNA library preparation kits (Swift BioSciences; Ann Arbor, Mich.) and constructed libraries were quantified using KAPA Library Quantification Kit for Illumina Platforms (Kapa Biosystems; Wilmington, Mass.). Four libraries along with 10% PhiX v3 library (Illumina, FC-110-3001) were pooled and clustered on an Illumina NovaSeq 7000 S2 flow cell followed by 150-bp paired-end sequencing (30×).

[0296] For each sample, the WGBS fragment set was reduced to a small subset of fragments having an anomalous methylation pattern. Additionally, hyper or hypomethylated cfDNA fragments were selected. cfDNA fragments selected for having an anomalous methylation pattern and being hyper or hypermethylated, i.e., UFXM. Fragments occurring at high frequency in individuals without cancer, or that have unstable methylation, are unlikely to produce highly discriminatory features for classification of cancer status. We therefore produced a statistical model and a data structure of typical fragments using an independent reference set of 108 non-smoking participants without cancer (age: 58±14 years, 79 [73%] women) (i.e., a reference genome) from the CCGA study. These samples were used to train a Markov-chain model (order 3) estimating the likelihood of a given sequence of CpG methylation statuses within a fragment as described above in Section II.C. This model was demonstrated to be calibrated within the normal fragment range (p-value>0.001) and was used to reject fragments with a p-value from the Markov model as >=0.001 as insufficiently unusual.

[0297] As described above, further data reduction step selected only fragments with at least 5 CpGs covered, and average methylation either >0.9 (hyper methylated) or <0.1 (hypo-methylated). This procedure resulted in a median (range) of 2,800 (1,500-12,000) UFXM fragments for participants without cancer in training, and a median (range) of 3,000 (1,200-420,000) UFXM fragments for participants with cancer in training. As this data reduction procedure only used reference set data, this stage was only required to be applied to each sample once.

### VI.B. Contamination Detection Results

[0298] As a first group of example results, to examine the performance of the contamination marker probes in Table 2 and Table 4, multiple batches of plasma cfDNA samples and gDNA samples from different internal studies, with and without any deliberate contamination, were used for preliminary analysis before further effort into the development of the codebase.

[0299] FIG. 7 illustrates the distribution of the fraction of the number of fragments classified as contamination to the total number of fragments called as reference or alternate for each contamination marker that was called as homozygous for the given sample, according to the first group of example results. The analytic system utilized contamination marker probes in Table 2 and Table 4 to identify contamination fragments in the samples. Fraction of contamination fragments was calculated as a ratio of the identified contamination fragments over the total number of fragments in each sample overlapping with the contamination marker probes. As shown in graph 700, each sample's fraction of contamination fragments was plotted, with the y-axis indicating the fraction of contamination fragments. Though there were several samples that had a value above 0.001, the overwhelming majority had a value below 0.001. The box plot in graph 700 shows the lower quartile, the median, and the upper quartile all well below −0.0005. Graph 710 shows the same results with the fraction of contamination fragments plotted on the x-axis and number of samples plotted on the y-axis. See FIG. 17 for a corresponding figure for the second group of example results.

[0300] FIG. 8 illustrates a scatter plot of the allele frequencies of the contamination markers, according to the first group of example results. The analytics system calculated the allelic fraction of the contamination markers using samples from the CCGA study and its follow-up studies. The analytics system also obtained population allelic fractions from genome databases 1000 Genomes Project and gnomAD. Each contamination marker is plotted with x-axis indicating the population allelic fraction and the y-axis indicating the allelic fraction as calculated from the samples. See FIG. 14 for a corresponding figure for the second group of example results.

[0301] FIG. 9 illustrates two graphs showing genotype and zygosity of the SNP contamination markers 900 and indel contamination markers 910, according to the first group of example results. In graph 900 for multiple SNP contamination markers, the three boxplots on the left representing proportional breakdown of zygosity of a first set of samples (reference homozygous, alternative homozygous, and heterozygous) with the three boxplots on the right representing proportional breakdown of zygosity of a second set of samples (reference homozygous, alternative homozygous, and heterozygous). Likewise, the graph 910 for indel contamination markers also represents the proportional breakdown of zygosity of the indel contamination makers split between the two sets of samples. See FIGS. 15 and 16 for corresponding figures for the second group of example results.

[0302] FIG. 10 illustrates a graph showing the fraction of contamination markers that were homozygous and had enough fragments overlapping with them for a given sample to be considered useful for estimating contamination for that sample, according to the first group of example results. The analytics system determined zygosity of the contamination markers for each sample. The analytics system then computed a percentage of the contamination markers that were found to be homozygous in a sample. A higher number of contamination markers that are found to be homozygous in a sample provide greater contamination detection ability. Furthermore, these homozygous sites go through various quality check criteria such as having enough sample fragments overlapping with them to be considered useful for estimating contamination in the sample, thereby yielding a final percentage of sites that are useful for a given sample. That percentage was plotted specifically for multiple SNP site contamination markers, for indel site contamination markers, and for both multiple SNP site contamination markers and indel site contamination markers. On the first box plot 1000, the median percentage was approximately 0.525. On the second box plot 1010 for multiple SNP site contamination markers, the median percentage was approximately 0.575. On the third box plot 1020 for indel site contamination markers. The median percentage was approximately 0.475. See FIGS. 15 and 13 for corresponding figures for the second group of example results.

[0303] FIGS. 11A & 11B illustrates graphs of estimated contamination levels detection for different batches of samples, according to the first group of example results. Graph 1100 shows a distribution of estimated sample contamination levels from the “Derisking” batch of samples. Graph 1110 shows a distribution of estimated sample contamination levels from the “doppler_prelim_test” batch of samples. Graph 1120 shows a distribution of estimated sample contamination levels from the “Hyb1_SOP_12plex” batch of samples. Graph 1130 shows a distribution of estimated sample contamination levels from the “MRD” batch of samples. Graph 1140 shows a distribution of estimated sample contamination levels from the “cfDNA titration” batch of samples. Graph 1150 shows a distribution of estimated sample contamination levels from the “gDNA titration” batch of samples. Graph 1160 shows a distribution of estimated sample contamination levels from the “downsampled gDNA titration (v1.0 chemistry)” batch of samples. Graph 1170 also shows a distribution of estimated sample contamination levels from the “downsampled gDNA titration (v1.5 chemistry)” batch of samples. See FIGS. 20 and 21 for corresponding figures for the second group of example results.

[0304] As a second group of example results, to examine the performance of the contamination marker probes in Table 2 and Table 4, a cohort of plasma cfDNA samples from 84 unique individuals without any deliberate contamination was used for a final analysis with a revised and mature codebase

[0305] FIG. 12 illustrates the distribution of the number of unique cfDNA fragments obtained per contamination marker as listed in Table 2 and Table 4, aggregated for the 84 samples in the experiment. The x-axis denotes the number of unique cfDNA fragment molecules overlapping with a probe designed to target the contamination marker, aggregated across all 84 samples, and the y-axis denotes the fraction of contamination markers which fall under the bin denoted by the x-axis.

[0306] Contamination markers as listed in Table 2 and Table 4 were selected without steps 220 and 250 of the analytics system. Any markers that were not in Hardy-Weinberg equilibrium were filtered out based on their population database frequencies for reference and alternate haplotypes. In this case, the value of the Hardy-Weinberg term (p2+2pq+q2) was in the range [0.9, 1.5] (the bias towards values higher than 1 is expected in non-random mating conditions in populations). Of the 1000 markers in Table 2 and Table 4, this condition failed 4 markers.

[0307] Each contamination marker was subject to a further quality check (QC) with respect to each individual sample for the cfDNA fragments that overlapped with the probes for that marker. Markers that did not pass quality check conditions for a particular sample were later discarded for that sample for any analysis that relies on a genomic variant call for the particular marker, including estimating the contamination fraction.

[0308] For each pair of a contamination marker and one sample from the 84 samples in the experiment, there was a minimum number, in this case 20, of unique cfDNA fragment molecules overlapping the position range of the genomic variant that could be used to reliably call the haplotypes and alleles for the Multiple SNPs markers and the Indel markers, respectively, as reference or alternate for more than a certain fraction (e.g., 0.7 for Multiple SNPs markers and 0.5 for Indel markers) of all cfDNA fragments. The latter condition expands to also check that the ratio of number of cfDNA fragments called with the reference haplotype to the number of cfDNA fragments called with the alternate haplotype should not be highly unlikely (e.g., p-value<10-5) as per the theoretical binomial probability distribution expected for the marker and sample pair (a mean of 0.5 for markers called as heterozygous, or a mean dependent on the aggregate contamination fraction across all markers in the sample called as homozygous).

[0309] FIG. 13 illustrates the results for this quality check process. Based on the criteria mentioned, 851 markers passed for all 84 samples, 68 markers passed for 83 samples and 20 markers passed for 82 samples. Seven markers failed (including the 4 that did not meet the Hardy-Weinberg equilibrium acceptance condition) for all 84 samples. The remaining markers had a varied failure rate in between these extremes.

[0310] FIGS. 14-16 illustrate characteristics of the genomic variants on which the contamination markers in Table 2 and Table 4 are based, for contamination markers that passed quality check criteria for at least 82 out of 84 samples. FIG. 14 illustrates a scatter plot of the allele frequencies that lie in the range [0.3, 0.7] as that was the allele frequency range for selecting these contamination markers. FIG. 15 illustrates a scatter plot of the frequency that the marker was called as heterozygous. FIG. 16 illustrates a scatter plot of the values of the Hardy-Weinberg term. The x-axis on each of these graphs represents the values as obtained or computed from the data available in population databases 1000 Genomes (for Multiple SNPs markers) or gnomAD (for Indel markers), and the y-axis represents the values as computed from the 84 cfDNA samples in our experiment. All points were expected to lie with some noise around the y=x line (represented in the graphs as the dashed line).

[0311] For estimating the contamination fraction in any set of cfDNA fragments, first, cfDNA fragments that came from a contamination source were identified. Any cfDNA fragment that was called as the variant opposite to the homozygous variant called for the marker was classified as a contamination fragment. Subsets of fragments where the fragments did not overlap with a contamination marker site, or overlapped with a contamination marker site genotyped as heterozygous, were ignored for the purposes of classifying contamination fragments and estimating contamination fraction. The ability to estimate a contamination fraction was conditioned on finding at least one contamination fragment. Since contamination fragments cannot be fractional, there was a lower limit on contamination fraction that can be detected, inversely proportional to the total number of fragments under consideration.

[0312] FIG. 17 illustrates the distribution of the fraction of the number of fragments classified as contamination to the total number of fragments called as reference or alternate for each contamination marker that was called as homozygous for the given sample, aggregated for each marker across all 84 samples. Graph 1710 shows the jittered scatter plot and the box plot for these values indicating the extremes and quartiles of the distribution. The arithmetic mean of these values is 2×10⁻⁴. Values lower than the lower limit of detection clamp down to 0 resulting in a small bump at 0. Graph 1720 shows smoothed density lines for the same data (solid line) and also for simulated values obtained using a binomial distribution fit to the data (dashed line) with the binomial parameter p=2×10⁻⁴ and the sample size being the aggregate number of cfDNA fragments for the particular contamination marker. Overall, there is good fit with some deviations at 0 and near the mode, which can be a subject of future investigation if desired.

[0313] Advancing the concept of contamination fragments, the contamination fraction of a given cfDNA sample was estimated by modeling the underlying process of cfDNA contamination from an external source. Considering only markers called as homozygous for the sample, if the contamination fraction is cf, and the population allelic frequency of the variant opposite to the homozygous variant called for the sample is afᵢ, then the probability of observing a contamination fragment for the marker is cf×afᵢ. If the total number of fragments at this marker is nᵢ, then the expected number of contamination fragments for the marker is cf×afᵢ×nᵢ. Using the Linearity of Expectation property from probability theory, one can sum these expected numbers for all markers to get a formula for the expected total number of contamination fragments across all markers, nc=Σᵢ(cf×afᵢ×nᵢ). Rearranging to bring all known variables on one side, an estimate of the contamination fraction becomes cf=nc/(Σᵢ(afᵢ×nᵢ)).

[0314] FIG. 18 illustrates the application of the formula for estimating contamination fraction for a hypothetical set of fragments. In this example, there are 4 Multiple SNPs and 2 Indel contamination markers, out of which only 3 Multiple SNPs and 1 Indel markers are called to be homozygous. Considering the identification of 3 contamination fragments, the total number of fragments for each marker, and the allelic frequency at each marker for the opposite haplotype, a contamination fraction estimate for the entire sample is obtained.

[0315] FIG. 19 illustrates the results of applying the contamination fraction model on simulated data. For each point, data was generated by sampling a variant call (homozygous reference, homozygous alternate, or heterozygous) for both the background genome and the contamination source genome, for each contamination marker in Table 2 and Table 4 based on their population frequencies. Then, the counts of reference and alternate haplotype fragments were sampled from a binomial distribution with size as the mean number of cfDNA fragments observed for this marker in the 84 samples from the experiment, and the probabilities as a function of the two variant calls and the contamination fraction input as a simulation parameter. Each simulation was repeated 100 times to capture the variability in estimates. The x-axis in the graph represents the contamination fraction that was used as a parameter for the simulation, and y-axis represents the contamination fraction values as estimated by the model. The dashed line represents the y=x line. Each box plot shows the range of estimated contamination fraction for the 100 simulations performed at the given contamination fraction parameter. The ranges indicate that the medians are very close to their expected values and that the interquartile range becomes smaller as the level of contamination increases. These results validate the model described herein for estimating contamination fraction.

[0316] FIG. 20 illustrates the results of applying the contamination fraction model on 4 titration pairs of cfDNA samples, each with varying titration levels. The donor sample in the titration pair would be treated as contamination and its titration level would be treated as the contamination fraction. To verify that the contamination fraction estimates were reliably obtained, each titration level for each pair was also repeated multiple times as per input material availability. The x-axis denotes the titration level and the y-axis denotes the estimated contamination fraction for each pair replicate titrated at that level. The solid line indicates a linear model fit for all the observations and the dashed line indicates the y=x line. The graph shows that the linear model fit has roughly the same slope as the y=x line, but the intercept of the two lines is different, indicating that all the samples had some constant unintended background contamination, with a value of approximately 2.5×10⁻⁴. A closer examination of the contamination fragments within these samples revealed that this constant residual contamination is real and not due to technical noise in variant calling or otherwise (not illustrated here). These results further validate the model described herein for estimating contamination fraction.

[0317] FIG. 21 illustrates the distribution of estimated contamination fraction for the 84 cfDNA samples in the experiment. The graph shows the jittered scatter plot as well as a boxplot for the estimated contamination fraction values. The median value is 1.8×10⁻⁴ and the mean value is 3.2×10′. Note that this mean value is different and higher than the mean value of the fraction of contamination fragments obtained for the same set of samples (2×10⁻⁴), which is expected because the contamination fraction model also accounts for contamination fragments that could not be identified when the marker has the same haplotype for both genomes.

[0318] FIG. 22 illustrates that the estimates obtained for the 84 samples in the experiment, when considering the Multiple SNPs markers and the Indel markers separately by themselves, are highly correlated and do not show any significant systemic bias. This verifies that both types of contamination markers are equivalent in their performance.

### VII. Additional Considerations

[0319] The foregoing detailed description of embodiments refers to the accompanying drawings, which illustrate specific embodiments of the present disclosure. Other embodiments having different structures and operations do not depart from the scope of the present disclosure. The term “the invention” or the like is used with reference to certain specific examples of the many alternative aspects or embodiments of the applicants' invention set forth in this specification, and neither its use nor its absence is intended to limit the scope of the applicants' invention or the scope of the claims.

[0320] Embodiments of the invention may also relate to an apparatus for performing the operations herein. This apparatus may be specially constructed for the required purposes, and/or it may comprise a general-purpose computing device selectively activated or reconfigured by a computer program stored in the computer. Such a computer program may be stored in a non-transitory, tangible computer readable storage medium, or any type of media suitable for storing electronic instructions, which may be coupled to a computer system bus. Furthermore, any computing systems referred to in the specification may include a single processor or may be architectures employing multiple processor designs for increased computing capability.

[0321] Any of the steps, operations, or processes described herein as being performed by the analytics system may be performed or implemented with one or more hardware or software modules of the apparatus, alone or in combination with other computing devices. In one embodiment, a software module is implemented with a computer program product comprising a computer-readable medium containing computer program code, which can be executed by a computer processor for performing any or all of the steps, operations, or processes described.

1. A method for predicting a presence of cancer in a test sample, the method comprising:
obtaining the test sample comprising a plurality of sequence reads for cell-free DNA (cfDNA) fragments in the test sample;
identifying one or more contamination markers from a plurality of contamination markers for which the test sample has a homozygous haplotype;
identifying any cfDNA fragments in the test sample having a different haplotype at one of the identified contamination markers than the homozygous haplotype of the respective contamination marker as a contaminated cfDNA fragment;
estimating a contamination level based on any identified contaminated cfDNA fragments;
determining whether the contamination level is below a threshold level; and
responsive to determining that the contamination level is below the threshold level, performing cancer classification on the sequence reads of the cfDNA fragments in the test sample to generate a cancer prediction.

2. The method of claim 1, wherein the plurality of contamination markers includes multiple single nucleotide polymorphism (multiple SNP) sites.

3. The method of claim 2, one or more of:
wherein the multiple SNP sites are within 10 basepairs (bps);
wherein the multiple SNP sites have population haplotype frequencies within the range 45%-55%;
wherein the multiple SNP sites exclude guanine-adenine polymorphisms and cytosine-thymine polymorphisms;
wherein the haplotypes of each multiple SNP site are in Hardy-Weinberg equilibrium; and
wherein the plurality of contamination markers includes at least 500, at least 1,000, at least 1,500, or at least 2,000 multiple SNP sites.

4.-7. (canceled)

8. The method of claim 2, wherein the plurality of contamination markers includes multiple SNP sites from Table 1.

9. The method of claim 1, wherein the plurality of contamination markers includes insertion-deletion (indel) sites.

10. The method of claim 9, one or more of:
wherein the indel sites are between 5 bps and 10 bps;
wherein the indel sites have population haplotype frequencies within the range 45%-55%;
wherein the haplotypes of each indel site are in Hardy-Weinberg equilibrium; and
wherein the plurality of contamination markers includes at least 500, at least 1,000, at least 1,500, or at least 2,000 indel sites.

11.-13. (canceled)

14. The method of claim 9, wherein the plurality of contamination markers includes indel sites from Table 3.

15. The method of claim 1, wherein each contamination marker includes a probe designed to target each haplotype of the contamination marker.

16. The method of claim 1, wherein estimating the contamination level is further based on one or more of: a number of identified contaminated cfDNA fragments, sequencing depth of the test sample, a number of cfDNA fragments in the test sample, and a number of contamination markers.

17. The method of claim 1, wherein responsive to determining that the contamination level is above the threshold level, forgoing cancer classification.

18. The method of claim 1, wherein the cancer prediction comprises:
a binary prediction between cancer and non-cancer; or
a multiclass cancer prediction between a plurality of cancer types.

19. (canceled)

20. The method of claim 1, wherein performing cancer classification comprises:
generating a test feature vector based on the sequence reads of the cfDNA fragments in the test sample; and
inputting the test feature vector into a classification model to generate the cancer prediction for the test sample.

21. The method of claim 20, wherein performing the cancer classification further comprises:
filtering an initial set of cfDNA fragments of the test sample with p-value filtering to generate a set of anomalous fragments, the filtering comprising removing fragments from the initial set having below a threshold p-value with respect to other fragments to produce the set of anomalous fragments,
wherein the test feature vector is based on the sequence reads of the set of anomalous fragments.

22. The method of claim 20, wherein the classification model is a machine-learning model.

23.-66. (canceled)

67. A method for training a cancer classification model, the method comprising:
obtaining a plurality of training samples including a first training sample, each training sample comprising a plurality of cell-free DNA (cfDNA) fragments;
for each training sample, obtaining sequence reads derived from the cfDNA fragments in the training sample;
for the first training sample:
identifying, based on the sequence reads of the first training sample, one or more contamination markers from a plurality of contamination markers for which the first training sample has a homozygous haplotype,
identifying any cfDNA fragments in the first training sample having a different haplotype at one of the identified contamination markers than the homozygous haplotype of the respective contamination marker as a contaminated cfDNA fragment,
estimating a contamination level based on any identified contaminated cfDNA fragments, and
determining whether the contamination level is below a threshold level; and
responsive to determining that the contamination level of the first training sample is above the threshold level, removing the first training sample from the plurality of training samples, wherein the plurality of training samples excluding the first training sample are used to train the cancer classification model to generate a cancer prediction for a test sample.

68. The method of claim 67, wherein the plurality of contamination markers includes multiple single nucleotide polymorphism (multiple SNP) sites.

69. The method of claim 68, one or more of:
wherein the multiple SNP sites are within 10 basepairs (bps);
wherein the multiple SNP sites have population haplotype frequencies within the range 45%-55%;
wherein the multiple SNP sites exclude guanine-adenine polymorphisms and cytosine-thymine polymorphisms;
wherein the haplotypes of each multiple SNP site are in Hardy-Weinberg equilibrium; and
wherein the plurality of contamination markers includes at least 500, at least 1,000, at least 1,500, or at least 2,000 multiple SNP sites.

70.-73. (canceled)

74. The method of claim 68, wherein the plurality of contamination markers includes multiple SNP sites from Table 1.

75. The method of claim 67, wherein the plurality of contamination markers includes insertion-deletion (indel) sites.

76. The method of claim 75, one or more of:
wherein the indel sites are between 5 bps and 10 bps;
wherein the indel sites have population haplotype frequencies within the range 45%-55%;
wherein the haplotypes of each indel site are in Hardy-Weinberg equilibrium; and
wherein the plurality of contamination markers includes at least 500, at least 1,000, at least 1,500, or at least 2,000 indel sites.

77.-79. (canceled)

80. The method of claim 75, wherein the plurality of contamination markers includes indel sites from Table 3.

81. The method of claim 67, wherein each contamination marker includes a probe designed to target each haplotype of the contamination marker.

82. The method of claim 67, wherein estimating the contamination level is further based on one or more of: a number of identified contaminated cfDNA fragments in the first training sample, sequencing depth of the first training sample, a number of cfDNA fragments in the first training sample, and a number of contamination markers.

83. The method of claim 67, wherein the plurality of training samples comprises a first cohort of non-cancer samples and a second cohort of cancer samples, wherein the cancer classification model is trained to determine a likelihood of presence of cancer.

84. The method of claim 83, wherein the second cohort of cancer samples comprises one or more samples having a first cancer type and one or more additional samples having a second cancer type, wherein the cancer classification model is trained to determine a first likelihood of presence of the first cancer type and a second likelihood of presence of the second cancer type.

85. The method of claim 67, wherein the cancer classification model is a machine-learning model.

86. The method of claim 85, wherein the cancer classification model is at least one of: a decision tree, a neural network, a multilayer perceptron, and a support vector machine.

87.-89. (canceled)

90. A treatment kit comprising:
one or more collection vessels for storing a biological sample comprising genetic material from an individual; and
a plurality of probes targeting a plurality of contamination markers, the plurality of probes including at least one of: Table 2 comprising SEQ ID No. 1-4000, and Table 4 comprising SEQ ID No. 4001-8000.

91. The treatment kit of claim 90, wherein the plurality of contamination markers includes multiple single nucleotide polymorphism (multiple SNP) sites.

92.-97. (canceled)

98. The treatment kit of claim 90, wherein the plurality of contamination markers includes insertion-deletion (indel) sites.

99.-103. (canceled)

104. The treatment kit of claim 90, wherein each contamination marker includes a probe designed to target each haplotype of the contamination marker.

105.-107. (canceled)

The application's sequence listing, which the Patent Office published only in electronic form, follows.

SEQUENCE LISTING (8000 sequences)

SEQ ID NO: 1 - DNA, 120 bp, synthetic construct
  source 1..120: mol_type = other DNA
tacttaccaataaaaaaatactattttccccatcatcccatcattaattatctaaacaaaacctcaataaatacccctttatataatacaactaccattcaattcatcaaaccaaaccct

SEQ ID NO: 2 - DNA, 120 bp, synthetic construct
  source 1..120: mol_type = other DNA
tgtttattagtaagaaaatattattttttttattattttattattaattatttaaatagagttttggtgaatgtttttttgtatagtgtagttgttatttagtttattaggttaagtttt

SEQ ID NO: 3 - DNA, 120 bp, synthetic construct
  source 1..120: mol_type = other DNA
tacttaccaataaaaaaatactattttccccatcatcccatcattaattatctaaactaaacctaaataaatacccctttatataatacaactaccattcaattcatcaaaccaaaccct

SEQ ID NO: 4 - DNA, 120 bp, synthetic construct
  source 1..120: mol_type = other DNA
tgtttattagtaagaaaatattattttttttattattttattattaattatttaaattgagtttgggtgaatgtttttttgtatagtgtagttgttatttagtttattaggttaagtttt

SEQ ID NO: 5 - DNA, 120 bp, synthetic construct
  source 1..120: mol_type = other DNA
tacttaccaataaaaaaatactattttccccatcatcccatcattaattatctaaacaaaacctcgataaatacccctttatataatacaactaccattcaattcatcaaaccaaaccct

SEQ ID NO: 6 - DNA, 120 bp, synthetic construct
  source 1..120: mol_type = other DNA
tgtttattagtaagaaaatattattttttttattattttattattaattatttaaatagagtttcggtgaatgtttttttgtatagtgtagttgttatttagtttattaggttaagtttt

SEQ ID NO: 7 - DNA, 120 bp, synthetic construct; identical to SEQ ID NO: 3
  source 1..120: mol_type = other DNA

SEQ ID NO: 8 - DNA, 120 bp, synthetic construct; identical to SEQ ID NO: 4
  source 1..120: mol_type = other DNA

SEQ ID NO: 9 - DNA, 120 bp, synthetic construct
  source 1..120: mol_type = other DNA
cttatcacttaaaattttctcatcaaaaaaacacaacttatactaaaattattcaacaccttaaacaaaaaaataaaatattatttattaaactctccttaaatcaaaacaattttcaaa

SEQ ID NO: 10 - DNA, 120 bp, synthetic construct
  source 1..120: mol_type = other DNA
tttgttatttgggatttttttgttagggaaatgtagtttatattgagattgtttaatgttttaggtaggaaggtgaagtgttgtttattgggttttttttaaattaaaatagtttttaag

SEQ ID NO: 11 - DNA, 120 bp, synthetic construct
  source 1..120: mol_type = other DNA
cttatcacttaaaattttctcatcaaaaaaacacaacttatactaaaattattcaaaaccttaaccaaaaaaataaaatattatttattaaactctccttaaatcaaaacaattttcaaa

SEQ ID NO: 12 - DNA, 120 bp, synthetic construct
  source 1..120: mol_type = other DNA
tttgttatttgggatttttttgttagggaaatgtagtttatattgagattgtttaaggttttagttaggaaggtgaagtgttgtttattgggttttttttaaattaaaatagtttttaag

SEQ ID NO: 13 - DNA, 120 bp, synthetic construct
  source 1..120: mol_type = other DNA
cttatcacttaaaattttctcgtcaaaaaaacgcaacttatactaaaattattcaacgccttaaacaaaaaaataaaatattatttattaaactctccttaaatcaaaacaattttcaaa

SEQ ID NO: 14 - DNA, 120 bp, synthetic construct
  source 1..120: mol_type = other DNA
tttgttatttgggattttttcgttagggaaacgtagtttatattgagattgtttaacgttttaggtaggaaggtgaagtgttgtttattgggttttttttaaattaaaatagtttttaag

SEQ ID NO: 15 - DNA, 120 bp, synthetic construct
  source 1..120: mol_type = other DNA
cttatcacttaaaattttctcgtcaaaaaaacgcaacttatactaaaattattcaaaaccttaaccaaaaaaataaaatattatttattaaactctccttaaatcaaaacaattttcaaa

SEQ ID NO: 16 - DNA, 120 bp, synthetic construct
  source 1..120: mol_type = other DNA
tttgttatttgggattttttcgttagggaaacgtagtttatattgagattgtttaaggttttagttaggaaggtgaagtgttgtttattgggttttttttaaattaaaatagtttttaag

SEQ ID NO: 17 - DNA, 120 bp, synthetic construct
  source 1..120: mol_type = other DNA
caaaatcactctctaacacattcaaaaacataaaaactacatacaatacaaaaaaacctatatccaaacttcctttcttaattttcctcctctaaactcatacatcccttcacaaacaat

SEQ ID NO: 18 - DNA, 120 bp, synthetic construct
  source 1..120: mol_type = other DNA
tggggttattttttggtgtatttggaggtatgagggttatgtgtaatgtgagggaatttatgtttaggtttttttttttggttttttttttttgaatttatgtatttttttataaatagt

SEQ ID NO: 19 - DNA, 120 bp, synthetic construct
  source 1..120: mol_type = other DNA
caaaatcactctctaacacattcaaaaacataaaaactacatacaatacaaaaaaaactatatcctaacttcctttcttaattttcctcctctaaactcatacatcccttcacaaacaat

SEQ ID NO: 20 - DNA, 120 bp, synthetic construct
  source 1..120: mol_type = other DNA
tggggttattttttggtgtatttggaggtatgagggttatgtgtaatgtgagggaaattatgttttggtttttttttttggttttttttttttgaatttatgtatttttttataaatagt

SEQ ID NO: 21 - DNA, 120 bp, synthetic construct
  source 1..120: mol_type = other DNA
cgaaatcactctctaacgcattcgaaaacataaaaactacgtacaatacgaaaaaacctatatccaaacttcctttcttaattttcctcctctaaactcatacatcccttcacaaacaat

SEQ ID NO: 22 - DNA, 120 bp, synthetic construct
  source 1..120: mol_type = other DNA
cggggttattttttggcgtattcggaggtatgagggttacgtgtaatgcgagggaatttatgtttaggtttttttttttggttttttttttttgaatttatgtatttttttataaatagt

SEQ ID NO: 23 - DNA, 120 bp, synthetic construct
  source 1..120: mol_type = other DNA
cgaaatcactctctaacgcattcgaaaacataaaaactacgtacaatacgaaaaaaactatatcctaacttcctttcttaattttcctcctctaaactcatacatcccttcacaaacaat

SEQ ID NO: 24 - DNA, 120 bp, synthetic construct
  source 1..120: mol_type = other DNA
cggggttattttttggcgtattcggaggtatgagggttacgtgtaatgcgagggaaattatgttttggtttttttttttggttttttttttttgaatttatgtatttttttataaatagt

SEQ ID NO: 25 - DNA, 120 bp, synthetic construct
  source 1..120: mol_type = other DNA
cttttatccccaaaaacaaaaaaaactaaaaaaaactccataacacaaataaactttcatatacaaccaaaaaaatccactataatcctaataaataacaaaaatcctcacacaacatct

SEQ ID NO: 26 - DNA, 120 bp, synthetic construct
  source 1..120: mol_type = other DNA
tttttgtttttaaaagtaggaagaattaaagaaggttttatggtataggtgggtttttgtatatggttagaaagatttattgtgattttaataaatgataaaaatttttatatagtattt

SEQ ID NO: 27 - DNA, 120 bp, synthetic construct
  source 1..120: mol_type = other DNA
cttttatccccaaaaacaaaaaaaactaaaaaaaactccataacacaaataaactttaatataaaaccaaaaaaatccactataatcctaataaataacaaaaatcctcacacaacatct

SEQ ID NO: 28 - DNA, 120 bp, synthetic construct
  source 1..120: mol_type = other DNA
tttttgtttttaaaagtaggaagaattaaagaaggttttatggtataggtgggttttggtataaggttagaaagatttattgtgattttaataaatgataaaaatttttatatagtattt

SEQ ID NO: 29 - DNA, 120 bp, synthetic construct
  source 1..120: mol_type = other DNA
cttttatccccaaaaacaaaaaaaactaaaaaaaactccataacacaaataaactttcgtatacgaccaaaaaaatccactataatcctaataaataacaaaaatcctcacacaacatct

SEQ ID NO: 30 - DNA, 120 bp, synthetic construct
  source 1..120: mol_type = other DNA
tttttgtttttaaaagtaggaagaattaaagaaggttttatggtataggtgggttttcgtatacggttagaaagatttattgtgattttaataaatgataaaaatttttatatagtattt

SEQ ID NO: 31 - DNA, 120 bp, synthetic construct; identical to SEQ ID NO: 27
  source 1..120: mol_type = other DNA

SEQ ID NO: 32 - DNA, 120 bp, synthetic construct; identical to SEQ ID NO: 28
  source 1..120: mol_type = other DNA

SEQ ID NO: 33 - DNA, 120 bp, synthetic construct
  source 1..120: mol_type = other DNA
aactttactaatcactaaaaatttcaaaaataaaatctctattccctaaaacaataccttaaactcaaaatttattatcataaataaaataaaacttcattaaaacaaaaaaaaattctc

SEQ ID NO: 34 - DNA, 120 bp, synthetic construct
  source 1..120: mol_type = other DNA
aattttattaattattaggaattttagaagtggaatttttgttttttggaatggtgttttggatttagaatttgttgttatgaatgaaatgagattttattaaaataaaaaaaggttttt

SEQ ID NO: 35 - DNA, 120 bp, synthetic construct
  source 1..120: mol_type = other DNA
aactttactaatcactaaaaatttcaaaaataaaatctctattccctaaaacaatacctaatactcaaaatttattatcataaataaaataaaacttcattaaaacaaaaaaaaattctc

SEQ ID NO: 36 - DNA, 120 bp, synthetic construct
  source 1..120: mol_type = other DNA
aattttattaattattaggaattttagaagtggaatttttgttttttggaatggtgtttggtatttagaatttgttgttatgaatgaaatgagattttattaaaataaaaaaaggttttt

SEQ ID NO: 37 - DNA, 120 bp, synthetic construct
  source 1..120: mol_type = other DNA
aactttactaatcactaaaaatttcaaaaataaaatctctattccctaaaacgataccttaaactcaaaatttattatcataaataaaataaaacttcattaaaacaaaaaaaaattctc

SEQ ID NO: 38 - DNA, 120 bp, synthetic construct
  source 1..120: mol_type = other DNA
aattttattaattattaggaattttagaagtggaatttttgttttttggaacggtgttttggatttagaatttgttgttatgaatgaaatgagattttattaaaataaaaaaaggttttt

SEQ ID NO: 39 - DNA, 120 bp, synthetic construct
  source 1..120: mol_type = other DNA
aactttactaatcactaaaaatttcaaaaataaaatctctattccctaaaacgatacctaatactcaaaatttattatcataaataaaataaaacttcattaaaacaaaaaaaaattctc

SEQ ID NO: 40 - DNA, 120 bp, synthetic construct
  source 1..120: mol_type = other DNA
aattttattaattattaggaattttagaagtggaatttttgttttttggaacggtgtttggtatttagaatttgttgttatgaatgaaatgagattttattaaaataaaaaaaggttttt

SEQ ID NO: 41 - DNA, 120 bp, synthetic construct
  source 1..120: mol_type = other DNA
aaaaaacaataaaactcaccccaccctcttaaattttaaaatctaaactcccccacataaaaaaacaatttctaattcctcaaaattttaaatacttacaacatcccctaccaaataacc

SEQ ID NO: 42 - DNA, 120 bp, synthetic construct
  source 1..120: mol_type = other DNA
agaaaataatggggtttattttatttttttaggttttgggatttgagtttttttatgtggagagatagtttttaattttttagaattttagatatttgtagtattttttgttaagtgatt

SEQ ID NO: 43 - DNA, 120 bp, synthetic construct
  source 1..120: mol_type = other DNA
aaaaaacaataaaactcaccccaccctcttaaattttaaaatctaaactcccccaaataaaaaaaaaatttctaattcctcaaaattttaaatacttacaacatcccctaccaaataacc

SEQ ID NO: 44 - DNA, 120 bp, synthetic construct
  source 1..120: mol_type = other DNA
agaaaataatggggtttattttatttttttaggttttgggatttgagtttttttaagtggagagaaagtttttaattttttagaattttagatatttgtagtattttttgttaagtgatt

SEQ ID NO: 45 - DNA, 120 bp, synthetic construct
  source 1..120: mol_type = other DNA
aaaaaacaataaaactcaccccaccctcttaaattttaaaatctaaactcccccacgtaaaaaaacaatttctaattcctcaaaattttaaatacttacaacatcccctaccaaataacc

SEQ ID NO: 46 - DNA, 120 bp, synthetic construct
  source 1..120: mol_type = other DNA
agaaaataatggggtttattttatttttttaggttttgggatttgagtttttttacgtggagagatagtttttaattttttagaattttagatatttgtagtattttttgttaagtgatt

SEQ ID NO: 47 - DNA, 120 bp, synthetic construct; identical to SEQ ID NO: 43
  source 1..120: mol_type = other DNA

SEQ ID NO: 48 - DNA, 120 bp, synthetic construct; identical to SEQ ID NO: 44
  source 1..120: mol_type = other DNA

SEQ ID NO: 49 - DNA, 120 bp, synthetic construct
  source 1..120: mol_type = other DNA
aaaatatatatatttaataaactatattcaaatttatattctaataccactaattaaatattaacaaatcaacactatacaaataattcctaacttacaataattccttccaatataatt

SEQ ID NO: 50 - DNA, 120 bp, synthetic construct
  source 1..120: mol_type = other DNA
aaaatatgtgtgtttgataaattgtatttaggtttgtgttttagtgttattggttgagtgttaatgaattaatattgtatagatgatttttgatttatgatggttttttttagtatgatt

SEQ ID NO: 51 - DNA, 120 bp, synthetic construct
  source 1..120: mol_type = other DNA
aaaatatatatatttaataaactatattcaaatttatattctaataccactaattcaatattaaccaatcaacactatacaaataattcctaacttacaataattccttccaatataatt

SEQ ID NO: 52 - DNA, 120 bp, synthetic construct
  source 1..120: mol_type = other DNA
aaaatatgtgtgtttgataaattgtatttaggtttgtgttttagtgttattggtttagtgttaattaattaatattgtatagatgatttttgatttatgatggttttttttagtatgatt

SEQ ID NO: 53 - DNA, 120 bp, synthetic construct
  source 1..120: mol_type = other DNA
aaaatatatatatttaataaactatattcaaatttatattctaataccactaattaaatattaacgaatcaacactatacaaataattcctaacttacgataattccttccaatataatt

SEQ ID NO: 54 - DNA, 120 bp, synthetic construct
  source 1..120: mol_type = other DNA
aaaatatgtgtgtttgataaattgtatttaggtttgtgttttagtgttattggttgagtgttaacgaattaatattgtatagatgatttttgatttacgatggttttttttagtatgatt

SEQ ID NO: 55 - DNA, 120 bp, synthetic construct
  source 1..120: mol_type = other DNA
aaaatatatatatttaataaactatattcaaatttatattctaataccactaattcaatattaaccaatcaacactatacaaataattcctaacttacgataattccttccaatataatt

SEQ ID NO: 56 - DNA, 120 bp, synthetic construct
  source 1..120: mol_type = other DNA
aaaatatgtgtgtttgataaattgtatttaggtttgtgttttagtgttattggtttagtgttaattaattaatattgtatagatgatttttgatttacgatggttttttttagtatgatt

SEQ ID NO: 57 - DNA, 120 bp, synthetic construct
  source 1..120: mol_type = other DNA
ctataaattcaaaaaaacataaaaaacttattaacaaatcacaaaacaaaaaccttataaaaacctcattcaaataaataaaaaattaaaaattataacacaattaaaaaaatataaaca

SEQ ID NO: 58 - DNA, 120 bp, synthetic construct
  source 1..120: mol_type = other DNA
ttatagatttaaagagatatgagaggtttattagtaaattataggataggggttttataagaattttgtttaaataaataaagggttaaaaattatagtataattagggaaatgtgaata

SEQ ID NO: 59 - DNA, 120 bp, synthetic construct
  source 1..120: mol_type = other DNA
ctataaattcaaaaaaacataaaaaacttattaacaaatcacaaaacaaaaaccttatataatcctcattcaaataaataaaaaattaaaaattataacacaattaaaaaaatataaaca

SEQ ID NO: 60 - DNA, 120 bp, synthetic construct
  source 1..120: mol_type = other DNA
ttatagatttaaagagatatgagaggtttattagtaaattataggataggggttttatatgatttttgtttaaataaataaagggttaaaaattatagtataattagggaaatgtgaata

SEQ ID NO: 61 - DNA, 120 bp, synthetic construct
  source 1..120: mol_type = other DNA
ctataaattcaaaaaaacataaaaaacttattaacaaatcacaaaacaaaaaccttataaaaacctcgttcaaataaataaaaaattaaaaattataacacaattaaaaaaatataaaca

SEQ ID NO: 62 - DNA, 120 bp, synthetic construct
  source 1..120: mol_type = other DNA
ttatagatttaaagagatatgagaggtttattagtaaattataggataggggttttataagaatttcgtttaaataaataaagggttaaaaattatagtataattagggaaatgtgaata

SEQ ID NO: 63 - DNA, 120 bp, synthetic construct
  source 1..120: mol_type = other DNA
ctataaattcaaaaaaacataaaaaacttattaacaaatcacaaaacaaaaaccttatataatcctcgttcaaataaataaaaaattaaaaattataacacaattaaaaaaatataaaca

SEQ ID NO: 64 - DNA, 120 bp, synthetic construct
  source 1..120: mol_type = other DNA
ttatagatttaaagagatatgagaggtttattagtaaattataggataggggttttatatgattttcgtttaaataaataaagggttaaaaattatagtataattagggaaatgtgaata

SEQ ID NO: 65 - DNA, 120 bp, synthetic construct
  source 1..120: mol_type = other DNA
cccaaaaataatacttccatcatctctaaatctttctactaactaaaatatattccttaaaaaccaaaaaactcaaacttaaaaaaacactaaaattaaactctcactcactacccctca

SEQ ID NO: 66 - DNA, 120 bp, synthetic construct
  source 1..120: mol_type = other DNA
tttaggggtaatatttttgttatttttgggtttttttgttggttgggatgtattttttgggaattgagagatttaaatttggggagatattggaattgagtttttatttattatttttta

SEQ ID NO: 67 - DNA, 120 bp, synthetic construct
  source 1..120: mol_type = other DNA
cccaaaaataatacttccatcatctctaaatctttctactaactaaaatatattccataaaaacccaaaaactcaaacttaaaaaaacactaaaattaaactctcactcactacccctca

SEQ ID NO: 68 - DNA, 120 bp, synthetic construct
  source 1..120: mol_type = other DNA
tttaggggtaatatttttgttatttttgggtttttttgttggttgggatgtattttgtgggaatttagagatttaaatttggggagatattggaattgagtttttatttattatttttta

SEQ ID NO: 69 - DNA, 120 bp, synthetic construct
  source 1..120: mol_type = other DNA
cccaaaaataatacttccgtcatctctaaatctttctactaactaaaatatattccttaaaaaccgaaaaactcaaacttaaaaaaacactaaaattaaactctcactcactacccctca

SEQ ID NO: 70 - DNA, 120 bp, synthetic construct
  source 1..120: mol_type = other DNA
tttaggggtaatattttcgttatttttgggtttttttgttggttgggatgtattttttgggaatcgagagatttaaatttggggagatattggaattgagtttttatttattatttttta

SEQ ID NO: 71 - DNA, 120 bp, synthetic construct
  source 1..120: mol_type = other DNA
cccaaaaataatacttccgtcatctctaaatctttctactaactaaaatatattccgtaaaaacccaaaaactcaaacttaaaaaaacactaaaattaaactctcactcactacccctca

SEQ ID NO: 72 - DNA, 120 bp, synthetic construct
  source 1..120: mol_type = other DNA
tttaggggtaatattttcgttatttttgggtttttttgttggttgggatgtatttcgtgggaatttagagatttaaatttggggagatattggaattgagtttttatttattatttttta

SEQ ID NO: 73 - DNA, 120 bp, synthetic construct
  source 1..120: mol_type = other DNA
tctataccttcattatcttacctatctacccctccaaacaacaaaactactaatacataaaaactaaatccttaatctccatctccctaacaccaaacattaatcctataacataacaaa

SEQ ID NO: 74 - DNA, 120 bp, synthetic construct
  source 1..120: mol_type = other DNA
tttgtgtttttattgttttgtttgtttgtttttttgagtagtaaaattgttggtgtataggaattgagtttttaatttttgtttttttggtattaagtattagttttgtggtataataag

SEQ ID NO: 75 - DNA, 120 bp, synthetic construct
  source 1..120: mol_type = other DNA
tctataccttcattatcttacctatctacccctccaaacaacaaaactactaatacatacaatctaaatccttaatctccatctccctaacaccaaacattaatcctataacataacaaa

SEQ ID NO: 76 - DNA, 120 bp, synthetic construct
  source 1..120: mol_type = other DNA
tttgtgtttttattgttttgtttgtttgtttttttgagtagtaaaattgttggtgtatatgatttgagtttttaatttttgtttttttggtattaagtattagttttgtggtataataag

SEQ ID NO: 77 - DNA, 120 bp, synthetic construct
  source 1..120: mol_type = other DNA
tctataccttcattatcttacctatctacccctccgaacaacaaaactactaatacataaaaactaaatccttaatctccgtctccctaacaccaaacattaatcctataacataacaaa

SEQ ID NO: 78 - DNA, 120 bp, synthetic construct
  source 1..120: mol_type = other DNA
tttgtgtttttattgttttgtttgtttgttttttcgagtagtaaaattgttggtgtataggaattgagtttttaattttcgtttttttggtattaagtattagttttgtggtataataag

SEQ ID NO: 79 - DNA, 120 bp, synthetic construct
  source 1..120: mol_type = other DNA
tctataccttcattatcttacctatctacccctccgaacaacaaaactactaatacatacgatctaaatccttaatctccgtctccctaacaccaaacattaatcctataacataacaaa

SEQ ID NO: 80 - DNA, 120 bp, synthetic construct
  source 1..120: mol_type = other DNA
tttgtgtttttattgttttgtttgtttgttttttcgagtagtaaaattgttggtgtatacgatttgagtttttaattttcgtttttttggtattaagtattagttttgtggtataataag

SEQ ID NO: 81 - DNA, 120 bp, synthetic construct
  source 1..120: mol_type = other DNA
ttcaaaaactataacttacttaaacaccaatataaccaaccataataattcataacacaatctaaaatcaataactatctattaatcaaatcttcatatataattacataacaataaata

SEQ ID NO: 82 - DNA, 120 bp, synthetic construct
  source 1..120: mol_type = other DNA
tttaaaaattatgatttgtttaggtattagtataattagttatagtagtttatagtataatttgggattggtaattatttattaattaagtttttatatatagttatataatagtagatg

SEQ ID NO: 83 - DNA, 120 bp, synthetic construct
  source 1..120: mol_type = other DNA
ttcaaaaactataacttacttaaacaccaatataaccaaccataataattcataacaaaatctacaatcaataactatctattaatcaaatcttcatatataattacataacaataaata

SEQ ID NO: 84 - DNA, 120 bp, synthetic construct
  source 1..120: mol_type = other DNA
tttaaaaattatgatttgtttaggtattagtataattagttatagtagtttatagtaaaatttgtgattggtaattatttattaattaagtttttatatatagttatataatagtagatg

SEQ ID NO: 85 - DNA, 120 bp, synthetic construct
  source 1..120: mol_type = other DNA
ttcaaaaactataacttacttaaacaccaatataaccaaccataataattcataacacaatctaaaatcgataactatctattaatcaaatcttcatatataattacataacaataaata

SEQ ID NO: 86 - DNA, 120 bp, synthetic construct
  source 1..120: mol_type = other DNA
tttaaaaattatgatttgtttaggtattagtataattagttatagtagtttatagtataatttgggatcggtaattatttattaattaagtttttatatatagttatataatagtagatg

SEQ ID NO: 87 - DNA, 120 bp, synthetic construct
  source 1..120: mol_type = other DNA
ttcaaaaactataacttacttaaacaccaatataaccaaccataataattcataacaaaatctacgatcgataactatctattaatcaaatcttcatatataattacataacaataaata

SEQ ID NO: 88 - DNA, 120 bp, synthetic construct
  source 1..120: mol_type = other DNA
tttaaaaattatgatttgtttaggtattagtataattagttatagtagtttatagtaaaatttgcgatcggtaattatttattaattaagtttttatatatagttatataatagtagatg

SEQ ID NO: 89 - DNA, 120 bp, synthetic construct
  source 1..120: mol_type = other DNA
tccttacaacaacaaaaaattcaaatacttatatcttcctaaaaataaatacacctcaaaaatccaaaaacaatttattcaaatatttcaaaatttcctttaccacttacttacctaatt

SEQ ID NO: 90 - DNA, 120 bp, synthetic construct
  source 1..120: mol_type = other DNA
tttttatagtaataaagaatttaaatatttgtatttttttgagaataggtgtattttggagatttaagagtaatttgtttagatattttaaaattttttttattatttgtttatttaatt

SEQ ID NO: 91 - DNA, 120 bp, synthetic construct
  source 1..120: mol_type = other DNA
tccttacaacaacaaaaaattcaaatacttatatcttcctaaaaataaatacacctaaaaaatcaaaaaacaatttattcaaatatttcaaaatttcctttaccacttacttacctaatt

SEQ ID NO: 92 - DNA, 120 bp, synthetic construct
  source 1..120: mol_type = other DNA
tttttatagtaataaagaatttaaatatttgtatttttttgagaataggtgtatttgggagattgaagagtaatttgtttagatattttaaaattttttttattatttgtttatttaatt

SEQ ID NO: 93 - DNA, 120 bp, synthetic construct
  source 1..120: mol_type = other DNA
tccttacaacaacaaaaaattcaaatacttatatcttcctaaaaataaatacacctcgaaaatccaaaaacaatttattcaaatatttcaaaatttcctttaccacttacttacctaatt

SEQ ID NO: 94 - DNA, 120 bp, synthetic construct
  source 1..120: mol_type = other DNA
tttttatagtaataaagaatttaaatatttgtatttttttgagaataggtgtatttcggagatttaagagtaatttgtttagatattttaaaattttttttattatttgtttatttaatt

SEQ ID NO: 95 - DNA, 120 bp, synthetic construct
  source 1..120: mol_type = other DNA
tccttacaacaacaaaaaattcaaatacttatatcttcctaaaaataaatacacctaaaaaatcgaaaaacaatttattcaaatatttcaaaatttcctttaccacttacttacctaatt

SEQ ID NO: 96 - DNA, 120 bp, synthetic construct
  source 1..120: mol_type = other DNA
tttttatagtaataaagaatttaaatatttgtatttttttgagaataggtgtatttgggagatcgaagagtaatttgtttagatattttaaaattttttttattatttgtttatttaatt

SEQ ID NO: 97 - DNA, 120 bp, synthetic construct
  source 1..120: mol_type = other DNA
ataacttattcaaaataatcactaataaaaataataacaacatttactaaatacttacaacatcacaaacatccatcaaaatacatcacaaatattaaataacttaatacattcaacccc

SEQ ID NO: 98 - DNA, 120 bp, synthetic construct
  source 1..120: mol_type = other DNA
gtgatttgtttaaggtagttattagtgaaagtaatggtaatgtttattgagtatttgtaatattgtagatatttattagagtatattgtaggtattaggtggtttaatgtatttagtttt

SEQ ID NO: 99 - DNA, 120 bp, synthetic construct
  source 1..120: mol_type = other DNA
ataacttattcaaaataatcactaataaaaataataacaacatttactaaatacttaaaacataacaaacatccatcaaaatacatcacaaatattaaataacttaatacattcaacccc

SEQ ID NO: 100 - DNA, 120 bp, synthetic construct
  source 1..120: mol_type = other DNA
gtgatttgtttaaggtagttattagtgaaagtaatggtaatgtttattgagtatttgaaatatagtagatatttattagagtatattgtaggtattaggtggtttaatgtatttagtttt

SEQ ID NO: 101 - DNA, 120 bp, synthetic construct
  source 1..120: mol_type = other DNA
ataacttattcaaaataatcactaataaaaataataacaacgtttactaaatacttacaacatcgcaaacatccatcaaaatacatcgcaaatattaaataacttaatacattcaacccc

SEQ ID NO: 102 - DNA, 120 bp, synthetic construct
  source 1..120: mol_type = other DNA
gtgatttgtttaaggtagttattagtgaaagtaatggtaacgtttattgagtatttgtaatatcgtagatatttattagagtatatcgtaggtattaggtggtttaatgtatttagtttt

SEQ ID NO: 103 - DNA, 120 bp, synthetic construct
  source 1..120: mol_type = other DNA
ataacttattcaaaataatcactaataaaaataataacaacgtttactaaatacttaaaacataacaaacatccatcaaaatacatcgcaaatattaaataacttaatacattcaacccc

SEQ ID NO: 104 - DNA, 120 bp, synthetic construct
  source 1..120: mol_type = other DNA
gtgatttgtttaaggtagttattagtgaaagtaatggtaacgtttattgagtatttgaaatatagtagatatttattagagtatatcgtaggtattaggtggtttaatgtatttagtttt

SEQ ID NO: 105 - DNA, 120 bp, synthetic construct
  source 1..120: mol_type = other DNA
catatatcattaaaaatatttacatacaatatccctcctaataacttaacaattcctcaatcctacaaaaactaatactactaacctatcaaactcaaactccttatctatttacatatt

SEQ ID NO: 106 - DNA, 120 bp, synthetic construct
  source 1..120: mol_type = other DNA
tatgtgttattgaaaatgtttgtatataatattttttttagtgatttaatagttttttagttttgtaggagttaatgttattaatttgttagatttaggttttttatttatttatatgtt

SEQ ID NO: 107 - DNA, 120 bp, synthetic construct
  source 1..120: mol_type = other DNA
catatatcattaaaaatatttacatacaatatccctcctaataacttaacaattccacaatcctaaaaaaactaatactactaacctatcaaactcaaactccttatctatttacatatt

SEQ ID NO: 108 - DNA, 120 bp, synthetic construct
  source 1..120: mol_type = other DNA
tatgtgttattgaaaatgtttgtatataatattttttttagtgatttaatagttttgtagttttgaaggagttaatgttattaatttgttagatttaggttttttatttatttatatgtt

SEQ ID NO: 109 - DNA, 120 bp, synthetic construct; identical to SEQ ID NO: 105
  source 1..120: mol_type = other DNA

SEQ ID NO: 110 - DNA, 120 bp, synthetic construct; identical to SEQ ID NO: 106
  source 1..120: mol_type = other DNA

SEQ ID NO: 111 - DNA, 120 bp, synthetic construct
  source 1..120: mol_type = other DNA
catatatcattaaaaatatttacatacaatatccctcctaataacttaacaattccgcaatcctaaaaaaactaatactactaacctatcaaactcaaactccttatctatttacatatt

SEQ ID NO: 112 - DNA, 120 bp, synthetic construct
  source 1..120: mol_type = other DNA
tatgtgttattgaaaatgtttgtatataatattttttttagtgatttaatagtttcgtagttttgaaggagttaatgttattaatttgttagatttaggttttttatttatttatatgtt

SEQ ID NO: 113 - DNA, 120 bp, synthetic construct
  source 1..120: mol_type = other DNA
taaacaacacataattataaaaaattctaatttaaattattacatttttatttaaattccacacaaaaaacatcttaaacaaccactacaaattatttctaaaaacaaaaaaaaacctaa

SEQ ID NO: 114 - DNA, 120 bp, synthetic construct
  source 1..120: mol_type = other DNA
tgagtaatatatgattgtagaaaattttaatttaaattattatatttttatttgggttttatgtagaaaatattttaggtagttattgtagattatttttagaagtgaagggaaatttgg

SEQ ID NO: 115 - DNA, 120 bp, synthetic construct
  source 1..120: mol_type = other DNA
taaacaacacataattataaaaaattctaatttaaattattacatttttatttaaattacactcaaaaaacatcttaaacaaccactacaaattatttctaaaaacaaaaaaaaacctaa

SEQ ID NO: 116 - DNA, 120 bp, synthetic construct
  source 1..120: mol_type = other DNA
tgagtaatatatgattgtagaaaattttaatttaaattattatatttttatttgggttgtatttagaaaatattttaggtagttattgtagattatttttagaagtgaagggaaatttgg

SEQ ID NO: 117 - DNA, 120 bp, synthetic construct
  source 1..120: mol_type = other DNA
taaacaacacataattataaaaaattctaatttaaattattacatttttatttaaattccacgcaaaaaacatcttaaacaaccactacaaattatttctaaaaacgaaaaaaaacctaa

SEQ ID NO: 118 - DNA, 120 bp, synthetic construct
  source 1..120: mol_type = other DNA
tgagtaatatatgattgtagaaaattttaatttaaattattatatttttatttgggttttacgtagaaaatattttaggtagttattgtagattatttttagaagcgaagggaaatttgg

SEQ ID NO: 119 - DNA, 120 bp, synthetic construct
  source 1..120: mol_type = other DNA
taaacaacacataattataaaaaattctaatttaaattattacatttttatttaaattacactcaaaaaacatcttaaacaaccactacaaattatttctaaaaacgaaaaaaaacctaa

SEQ ID NO: 120 - DNA, 120 bp, synthetic construct
  source 1..120: mol_type = other DNA
tgagtaatatatgattgtagaaaattttaatttaaattattatatttttatttgggttgtatttagaaaatattttaggtagttattgtagattatttttagaagcgaagggaaatttgg

SEQ ID NO: 121 - DNA, 120 bp, synthetic construct
  source 1..120: mol_type = other DNA
taaataaataaaataataaaaaaaaataaataaacacatacatcaatatttaacataactacaattcctctcatttctcacaaataataaaaatatcaacactaaaaaaaaacatctata

SEQ ID NO: 122 - DNA, 120 bp, synthetic construct
  source 1..120: mol_type = other DNA
tgaatgaatggagtggtaggaagaagtgagtaaatatatgtattaatgtttaatatagttgtggttttttttattttttataaataataaaaatgttagtattggaagggaatatttgta

SEQ ID NO: 123 - DNA, 120 bp, synthetic construct
  source 1..120: mol_type = other DNA
taaataaataaaataataaaaaaaaataaataaacacatacatcaatatttaacatatctacaaatcctctcatttctcacaaataataaaaatatcaacactaaaaaaaaacatctata

SEQ ID NO: 124 - DNA, 120 bp, synthetic construct
  source 1..120: mol_type = other DNA
tgaatgaatggagtggtaggaagaagtgagtaaatatatgtattaatgtttaatatatttgtgggtttttttattttttataaataataaaaatgttagtattggaagggaatatttgta

SEQ ID NO: 125 - DNA, 120 bp, synthetic construct
  source 1..120: mol_type = other DNA
taaataaataaaataataaaaaaaaataaataaacacatacatcaatatttaacataactacgattcctctcatttctcacaaataataaaaatatcaacactaaaaaaaaacatctata

SEQ ID NO: 126 - DNA, 120 bp, synthetic construct
  source 1..120: mol_type = other DNA
tgaatgaatggagtggtaggaagaagtgagtaaatatatgtattaatgtttaatatagttgcggttttttttattttttataaataataaaaatgttagtattggaagggaatatttgta

SEQ ID NO: 127 - DNA, 120 bp, synthetic construct
  source 1..120: mol_type = other DNA
taaataaataaaataataaaaaaaaataaataaacacatacatcaatatttaacatatctacgaatcctctcatttctcacaaataataaaaatatcaacactaaaaaaaaacatctata

SEQ ID NO: 128 - DNA, 120 bp, synthetic construct
  source 1..120: mol_type = other DNA
tgaatgaatggagtggtaggaagaagtgagtaaatatatgtattaatgtttaatatatttgcgggtttttttattttttataaataataaaaatgttagtattggaagggaatatttgta

SEQ ID NO: 129 - DNA, 120 bp, synthetic construct
  source 1..120: mol_type = other DNA
aaccaaaaatcaaaaaaaaaactcacaaaatataaaattatactaaaccattctacaaaaaaatataaattttcttctaaaattattaatcaaacccacaaacactacctataatactaa

SEQ ID NO: 130 - DNA, 120 bp, synthetic construct
  source 1..120: mol_type = other DNA
agttaagaattagagaggagatttataaaatgtaaaattgtattaaattgttttatagaaaggtatgggtttttttttgaagttgttggttagatttataagtattgtttgtagtattga

SEQ ID NO: 131 - DNA, 120 bp, synthetic construct
  source 1..120: mol_type = other DNA
aaccaaaaatcaaaaaaaaaactcacaaaatataaaattatactaaaccattctacacaaaaatctaaattttcttctaaaattattaatcaaacccacaaacactacctataatactaa

SEQ ID NO: 132 - DNA, 120 bp, synthetic construct
  source 1..120: mol_type = other DNA
agttaagaattagagaggagatttataaaatgtaaaattgtattaaattgttttatataaaggtttgggtttttttttgaagttgttggttagatttataagtattgtttgtagtattga

SEQ ID NO: 133 - DNA, 120 bp, synthetic construct
  source 1..120: mol_type = other DNA
aaccaaaaatcaaaaaaaaaactcacaaaatataaaattatactaaaccgttctacaaaaaaatataaattttcttctaaaattattaatcaaacccacaaacactacctataatactaa

SEQ ID NO: 134 - DNA, 120 bp, synthetic construct
  source 1..120: mol_type = other DNA
agttaagaattagagaggagatttataaaatgtaaaattgtattaaatcgttttatagaaaggtatgggtttttttttgaagttgttggttagatttataagtattgtttgtagtattga

SEQ ID NO: 135 - DNA, 120 bp, synthetic construct
  source 1..120: mol_type = other DNA
aaccaaaaatcaaaaaaaaaactcacaaaatataaaattatactaaaccgttctacacaaaaatctaaattttcttctaaaattattaatcaaacccacaaacactacctataatactaa

SEQ ID NO: 136 - DNA, 120 bp, synthetic construct
  source 1..120: mol_type = other DNA
agttaagaattagagaggagatttataaaatgtaaaattgtattaaatcgttttatataaaggtttgggtttttttttgaagttgttggttagatttataagtattgtttgtagtattga

SEQ ID NO: 137 - DNA, 120 bp, synthetic construct
  source 1..120: mol_type = other DNA
tacctcccaactccctctcaacccaccctttccaaaattaaaaaacttaaaacataaacttacttccataaaaaatctccacccaaaaataaatctttctaacccccaacccaactccca

SEQ ID NO: 138 - DNA, 120 bp, synthetic construct
  source 1..120: mol_type = other DNA
tattttttagtttttttttaatttattttttttagggttggagaatttgaggtataaatttgtttttatgaggaatttttatttagaaatgggtttttttggtttttagtttagttttta

SEQ ID NO: 139 - DNA, 120 bp, synthetic construct
  source 1..120: mol_type = other DNA
tacctcccaactccctctcaacccaccctttccaaaattaaaaaacttaaaacataaacattcttccataaaaaatctccacccaaaaataaatctttctaacccccaacccaactccca

SEQ ID NO: 140 - DNA, 120 bp, synthetic construct
  source 1..120: mol_type = other DNA
tattttttagtttttttttaatttattttttttagggttggagaatttgaggtataaatatttttttatgaggaatttttatttagaaatgggtttttttggtttttagtttagttttta

SEQ ID NO: 141 - DNA, 120 bp, synthetic construct; identical to SEQ ID NO: 137
  source 1..120: mol_type = other DNA

SEQ ID NO: 142 - DNA, 120 bp, synthetic construct; identical to SEQ ID NO: 138
  source 1..120: mol_type = other DNA

SEQ ID NO: 143 - DNA, 120 bp, synthetic construct; identical to SEQ ID NO: 139
  source 1..120: mol_type = other DNA

SEQ ID NO: 144 - DNA, 120 bp, synthetic construct; identical to SEQ ID NO: 140
  source 1..120: mol_type = other DNA

SEQ ID NO: 145 - DNA, 120 bp, synthetic construct
  source 1..120: mol_type = other DNA
aatcatataaaaaaatacaaaaaaaataaattaaaaataacataacaaacatttacaaaacaatcaatcctaatcccaaataatattataaaaacaataaataaacataatataataaca

SEQ ID NO: 146 - DNA, 120 bp, synthetic construct
  source 1..120: mol_type = other DNA
aattatgtgaaaaggtgtgggaaaaatagattgagaatggtataataagtatttgtagaatgattagttttggttttaagtgatattataagggtaatagataggtataatgtaataata

SEQ ID NO: 147 - DNA, 120 bp, synthetic construct
  source 1..120: mol_type = other DNA
aatcatataaaaaaatacaaaaaaaataaattaaaaataacataacaaacatttacaaaaatatcaatcctaatcccaaataatattataaaaacaataaataaacataatataataaca

SEQ ID NO: 148 - DNA, 120 bp, synthetic construct
  source 1..120: mol_type = other DNA
aattatgtgaaaaggtgtgggaaaaatagattgagaatggtataataagtatttgtagaaatattagttttggttttaagtgatattataagggtaatagataggtataatgtaataata

SEQ ID NO: 149 - DNA, 120 bp, synthetic construct
  source 1..120: mol_type = other DNA
aatcatataaaaaaatacgaaaaaaataaattaaaaataacataacaaacatttacaaaacgatcaatcctaatcccaaataatattataaaaacaataaataaacataatataataaca

SEQ ID NO: 150 - DNA, 120 bp, synthetic construct
  source 1..120: mol_type = other DNA
aattatgtgaaaaggtgcgggaaaaatagattgagaatggtataataagtatttgtagaacgattagttttggttttaagtgatattataagggtaatagataggtataatgtaataata

SEQ ID NO: 151 - DNA, 120 bp, synthetic construct
  source 1..120: mol_type = other DNA
aatcatataaaaaaatacgaaaaaaataaattaaaaataacataacaaacatttacaaaaatatcaatcctaatcccaaataatattataaaaacaataaataaacataatataataaca

SEQ ID NO: 152 - DNA, 120 bp, synthetic construct
  source 1..120: mol_type = other DNA
aattatgtgaaaaggtgcgggaaaaatagattgagaatggtataataagtatttgtagaaatattagttttggttttaagtgatattataagggtaatagataggtataatgtaataata

SEQ ID NO: 153 - DNA, 120 bp, synthetic construct
  source 1..120: mol_type = other DNA
ttaacttctccttcacaaacaaaataaaatcaaaaaataacctttaaatactttctaaacaacccaaaaataaaaaaacactctaaacctaaactctttaaactacccaaaaataaaaat

SEQ ID NO: 154 - DNA, 120 bp, synthetic construct
  source 1..120: mol_type = other DNA
ttaattttttttttgtagataagatgaagttaaaaagtggtttttgagtattttttaagtaatttgggagtagaagaatgttttaaatttggattttttgagttgtttaaaagtaaaggt

SEQ ID NO: 155 - DNA, 120 bp, synthetic construct
  source 1..120: mol_type = other DNA
ttaacttctccttcacaaacaaaataaaatcaaaaaataacctttaaatactttctaaactccccaaaaataaaaaaacactctaaacctaaactctttaaactacccaaaaataaaaat

SEQ ID NO: 156 - DNA, 120 bp, synthetic construct
  source 1..120: mol_type = other DNA
ttaattttttttttgtagataagatgaagttaaaaagtggtttttgagtattttttaagttttttgggagtagaagaatgttttaaatttggattttttgagttgtttaaaagtaaaggt

SEQ ID NO: 157 - DNA, 120 bp, synthetic construct
  source 1..120: mol_type = other DNA
ttaacttctccttcgcaaacaaaataaaatcaaaaaataacctttaaatactttctaaacaacccgaaaataaaaaaacgctctaaacctaaactctttaaactacccaaaaataaaaat

SEQ ID NO: 158 - DNA, 120 bp, synthetic construct
  source 1..120: mol_type = other DNA
ttaatttttttttcgtagataagatgaagttaaaaagtggtttttgagtattttttaagtaattcgggagtagaagaacgttttaaatttggattttttgagttgtttaaaagtaaaggt

SEQ ID NO: 159 - DNA, 120 bp, synthetic construct
  source 1..120: mol_type = other DNA
ttaacttctccttcgcaaacaaaataaaatcaaaaaataacctttaaatactttctaaactccccgaaaataaaaaaacgctctaaacctaaactctttaaactacccaaaaataaaaat

SEQ ID NO: 160 - DNA, 120 bp, synthetic construct
  source 1..120: mol_type = other DNA
ttaatttttttttcgtagataagatgaagttaaaaagtggtttttgagtattttttaagtttttcgggagtagaagaacgttttaaatttggattttttgagttgtttaaaagtaaaggt

SEQ ID NO: 161 - DNA, 120 bp, synthetic construct
  source 1..120: mol_type = other DNA
aaatctcttctaaaaatatatctcctttaccaatttaccttccaaaaacataacatcctttaaacactttatataaaacaatcatcaactttaaaaaaaatttacactaaatcatatcaa

SEQ ID NO: 162 - DNA, 120 bp, synthetic construct
  source 1..120: mol_type = other DNA
gaattttttttggaagtatattttttttattagtttgttttttaaggatgtggtattttttggatgttttgtgtagaataattattaattttagaaaaaatttgtattaggttatgttaa

SEQ ID NO: 163 - DNA, 120 bp, synthetic construct
  source 1..120: mol_type = other DNA
aaatctcttctaaaaatatatctcctttaccaatttaccttccaaaaacataacaacctttaaaccctttatataaaacaatcatcaactttaaaaaaaatttacactaaatcatatcaa

SEQ ID NO: 164 - DNA, 120 bp, synthetic construct
  source 1..120: mol_type = other DNA
gaattttttttggaagtatattttttttattagtttgttttttaaggatgtggtaatttttggattttttgtgtagaataattattaattttagaaaaaatttgtattaggttatgttaa

SEQ ID NO: 165 - DNA, 120 bp, synthetic construct
  source 1..120: mol_type = other DNA
aaatctcttctaaaaatatatctcctttaccaatttaccttccaaaaacgtaacatcctttaaacgctttatataaaacaatcatcaactttaaaaaaaatttacactaaatcatatcaa

SEQ ID NO: 166 - DNA, 120 bp, synthetic construct
  source 1..120: mol_type = other DNA
gaattttttttggaagtatattttttttattagtttgttttttaaggacgtggtattttttggacgttttgtgtagaataattattaattttagaaaaaatttgtattaggttatgttaa

SEQ ID NO: 167 - DNA, 120 bp, synthetic construct
  source 1..120: mol_type = other DNA
aaatctcttctaaaaatatatctcctttaccaatttaccttccaaaaacgtaacaacctttaaaccctttatataaaacaatcatcaactttaaaaaaaatttacactaaatcatatcaa

SEQ ID NO: 168 - DNA, 120 bp, synthetic construct
  source 1..120: mol_type = other DNA
gaattttttttggaagtatattttttttattagtttgttttttaaggacgtggtaatttttggattttttgtgtagaataattattaattttagaaaaaatttgtattaggttatgttaa

SEQ ID NO: 169 - DNA, 120 bp, synthetic construct
  source 1..120: mol_type = other DNA
attcacacaataaacaacaattttaaaaaaatacaaaataaatataaaacaatttctccaccttacaacttaatacacactccacaaactaaaaaaaaaaaaaaaattcaaaacaaaaac

SEQ ID NO: 170 - DNA, 120 bp, synthetic construct
  source 1..120: mol_type = other DNA
atttatataataaataatagttttggaagaatgtaggatgaatgtgaggtagtttttttattttataatttgatatatattttataggttggggagagagagaagatttagagtaaaagt

SEQ ID NO: 171 - DNA, 120 bp, synthetic construct
  source 1..120: mol_type = other DNA
attcacacaataaacaacaattttaaaaaaatacaaaataaatataaaacaatttatccaccttaaaacttaatacacactccacaaactaaaaaaaaaaaaaaaattcaaaacaaaaac

SEQ ID NO: 172 - DNA, 120 bp, synthetic construct
  source 1..120: mol_type = other DNA
atttatataataaataatagttttggaagaatgtaggatgaatgtgaggtagtttgtttattttaaaatttgatatatattttataggttggggagagagagaagatttagagtaaaagt

SEQ ID NO: 173 - DNA, 120 bp, synthetic construct; identical to SEQ ID NO: 169
  source 1..120: mol_type = other DNA

SEQ ID NO: 174 - DNA, 120 bp, synthetic construct; identical to SEQ ID NO: 170
  source 1..120: mol_type = other DNA

SEQ ID NO: 175 - DNA, 120 bp, synthetic construct; identical to SEQ ID NO: 171
  source 1..120: mol_type = other DNA

SEQ ID NO: 176 - DNA, 120 bp, synthetic construct; identical to SEQ ID NO: 172
  source 1..120: mol_type = other DNA

SEQ ID NO: 177 - DNA, 120 bp, synthetic construct
  source 1..120: mol_type = other DNA
tttcttaaaaaaaactaattaatcttattttaccaaacaaaaaaattataaatataactaaaccaattttatacactttaaaatatcaaccctatcaattttatatttctcaataaaaaa

SEQ ID NO: 178 - DNA, 120 bp, synthetic construct
  source 1..120: mol_type = other DNA
ttttttgaggaaagttgattaattttgttttgttaagtagaaggattatgggtatggttgaattagttttgtatgttttgaaatattagttttgttaattttgtgttttttagtgaggga

SEQ ID NO: 179 - DNA, 120 bp, synthetic construct
  source 1..120: mol_type = other DNA
tttcttaaaaaaaactaattaatcttattttaccaaacaaaaaaattataaatatacctaaaccacttttatacactttaaaatatcaaccctatcaattttatatttctcaataaaaaa

SEQ ID NO: 180 - DNA, 120 bp, synthetic construct
  source 1..120: mol_type = other DNA
ttttttgaggaaagttgattaattttgttttgttaagtagaaggattatgggtatgtttgaattatttttgtatgttttgaaatattagttttgttaattttgtgttttttagtgaggga

SEQ ID NO: 181 - DNA, 120 bp, synthetic construct
  source 1..120: mol_type = other DNA
tttcttaaaaaaaactaattaatcttattttaccaaacaaaaaaattataaatataactaaaccaattttatacgctttaaaatatcaaccctatcaattttatatttctcaataaaaaa

SEQ ID NO: 182 - DNA, 120 bp, synthetic construct
  source 1..120: mol_type = other DNA
ttttttgaggaaagttgattaattttgttttgttaagtagaaggattatgggtatggttgaattagttttgtacgttttgaaatattagttttgttaattttgtgttttttagtgaggga

SEQ ID NO: 183 - DNA, 120 bp, synthetic construct
  source 1..120: mol_type = other DNA
tttcttaaaaaaaactaattaatcttattttaccaaacaaaaaaattataaatatacctaaaccacttttatacgctttaaaatatcaaccctatcaattttatatttctcaataaaaaa

SEQ ID NO: 184 - DNA, 120 bp, synthetic construct
  source 1..120: mol_type = other DNA
ttttttgaggaaagttgattaattttgttttgttaagtagaaggattatgggtatgtttgaattatttttgtacgttttgaaatattagttttgttaattttgtgttttttagtgaggga

SEQ ID NO: 185 - DNA, 120 bp, synthetic construct
  source 1..120: mol_type = other DNA
taatacctaattacctattccatcccacccttaaaaattttaaatccttcttaacacacattaatacctaaaatcatctcattcattaatccctttacttatttattatatcttccctcc

SEQ ID NO: 186 - DNA, 120 bp, synthetic construct
  source 1..120: mol_type = other DNA
taatgtttgattatttattttattttatttttgaaagttttaggttttttttagtatatattagtgtttgaaattattttatttattgatttttttatttgtttattgtatttttttttt

SEQ ID NO: 187 - DNA, 120 bp, synthetic construct
  source 1..120: mol_type = other DNA
taatacctaattacctattccatcccacccttaaaaattttaaatccttcttaacactcattattacctaaaatcatctcattcattaatccctttacttatttattatatcttccctcc

SEQ ID NO: 188 - DNA, 120 bp, synthetic construct
  source 1..120: mol_type = other DNA
taatgtttgattatttattttattttatttttgaaagttttaggttttttttagtatttattattgtttgaaattattttatttattgatttttttatttgtttattgtatttttttttt

SEQ ID NO: 189 - DNA, 120 bp, synthetic construct; identical to SEQ ID NO: 185
  source 1..120: mol_type = other DNA

SEQ ID NO: 190 - DNA, 120 bp, synthetic construct; identical to SEQ ID NO: 186
  source 1..120: mol_type = other DNA

SEQ ID NO: 191 - DNA, 120 bp, synthetic construct; identical to SEQ ID NO: 187
  source 1..120: mol_type = other DNA

SEQ ID NO: 192 - DNA, 120 bp, synthetic construct; identical to SEQ ID NO: 188
  source 1..120: mol_type = other DNA

SEQ ID NO: 193 - DNA, 120 bp, synthetic construct
  source 1..120: mol_type = other DNA
ataattaaactaaaaaaaattactaacacctcccaaattaacctaataataaaaacaaaaacacaacaatacttaaaaatacaaccctaaaaaattaataccacactctaacatataaat

SEQ ID NO: 194 - DNA, 120 bp, synthetic construct
  source 1..120: mol_type = other DNA
gtaattaggttgaaaaaaattgttggtattttttaaattgatttggtgataaggatgaaagtatggtagtatttgggagtatagttttgaaaggttaatgttatattttgatatgtggat

SEQ ID NO: 195 - DNA, 120 bp, synthetic construct
  source 1..120: mol_type = other DNA
ataattaaactaaaaaaaattactaacacctcccaaattaacctaataataaaaaaaaaaacacatcaatacttaaaaatacaaccctaaaaaattaataccacactctaacatataaat

SEQ ID NO: 196 - DNA, 120 bp, synthetic construct
  source 1..120: mol_type = other DNA
gtaattaggttgaaaaaaattgttggtattttttaaattgatttggtgataaggaagaaagtatgttagtatttgggagtatagttttgaaaggttaatgttatattttgatatgtggat

SEQ ID NO: 197 - DNA, 120 bp, synthetic construct
  source 1..120: mol_type = other DNA
ataattaaactaaaaaaaattactaacacctcccaaattaacctaataataaaaacgaaaacacgacaatacttaaaaatacaaccctaaaaaattaataccacactctaacatataaat

SEQ ID NO: 198 - DNA, 120 bp, synthetic construct
  source 1..120: mol_type = other DNA
gtaattaggttgaaaaaaattgttggtattttttaaattgatttggtgataaggacgaaagtacggtagtatttgggagtatagttttgaaaggttaatgttatattttgatatgtggat

SEQ ID NO: 199 - DNA, 120 bp, synthetic construct
  source 1..120: mol_type = other DNA
ataattaaactaaaaaaaattactaacacctcccaaattaacctaataataaaaaaaaaaacacgtcaatacttaaaaatacaaccctaaaaaattaataccacactctaacatataaat

SEQ ID NO: 200 - DNA, 120 bp, synthetic construct
  source 1..120: mol_type = other DNA
gtaattaggttgaaaaaaattgttggtattttttaaattgatttggtgataaggaagaaagtacgttagtatttgggagtatagttttgaaaggttaatgttatattttgatatgtggat

SEQ ID NO: 201 - DNA, 120 bp, synthetic construct
  source 1..120: mol_type = other DNA
ttaaaactaactacaacaaaaaaaaaccacttatataaataacaaaaccatcataaaaaaaacaacatcttaaaaaaaaacaatccataaaaaacacctaaaaaaaaaaaaatatttaaa

SEQ ID NO: 202 - DNA, 120 bp, synthetic construct
  source 1..120: mol_type = other DNA
ttaggattagttgtaatagaagagaattatttatataaatagtaaggttattataaagaaagtaatgttttagggaagagtaatttatgaaggatgtttggaggaaaagagatatttaaa

SEQ ID NO: 203 - DNA, 120 bp, synthetic construct
  source 1..120: mol_type = other DNA
ttaaaactaactacaacaaaaaaaaaccacttatataaataacaaaaccatcatacaaaaaacaaaatcttaaaaaaaaacaatccataaaaaacacctaaaaaaaaaaaaatatttaaa

SEQ ID NO: 204 - DNA, 120 bp, synthetic construct
  source 1..120: mol_type = other DNA
ttaggattagttgtaatagaagagaattatttatataaatagtaaggttattatatagaaagtaaagttttagggaagagtaatttatgaaggatgtttggaggaaaagagatatttaaa

SEQ ID NO: 205 - DNA, 120 bp, synthetic construct
  source 1..120: mol_type = other DNA
ttaaaactaactacaacaaaaaaaaaccacttatataaataacaaaaccatcataaaaaaaacaacgtcttaaaaaaaaacaatccataaaaaacgcctaaaaaaaaaaaaatatttaaa

SEQ ID NO: 206 - DNA, 120 bp, synthetic construct
  source 1..120: mol_type = other DNA
ttaggattagttgtaatagaagagaattatttatataaatagtaaggttattataaagaaagtaacgttttagggaagagtaatttatgaaggacgtttggaggaaaagagatatttaaa

SEQ ID NO: 207 - DNA, 120 bp, synthetic construct
  source 1..120: mol_type = other DNA
ttaaaactaactacaacaaaaaaaaaccacttatataaataacaaaaccatcatacaaaaaacaaaatcttaaaaaaaaacaatccataaaaaacgcctaaaaaaaaaaaaatatttaaa

SEQ ID NO: 208 - DNA, 120 bp, synthetic construct
  source 1..120: mol_type = other DNA
ttaggattagttgtaatagaagagaattatttatataaatagtaaggttattatatagaaagtaaagttttagggaagagtaatttatgaaggacgtttggaggaaaagagatatttaaa

SEQ ID NO: 209 - DNA, 120 bp, synthetic construct
  source 1..120: mol_type = other DNA
aacactcctaaactaatccttaaacaaataaaaccttttttttctaaactcacacccaaaaaacaaacttaatactaataattaatcaatacataaatacaaaaacctaacctctctctc

SEQ ID NO: 210 - DNA, 120 bp, synthetic construct
  source 1..120: mol_type = other DNA
aatatttttggattggtttttggataaatagaattttttttttttaaatttatatttggagagtaagtttgatattaatgattgattaatgtatgagtataaaaatttggtttttttttt

SEQ ID NO: 211 - DNA, 120 bp, synthetic construct
  source 1..120: mol_type = other DNA
aacactcctaaactaatccttaaacaaataaaaccttttttttctaaactcacaccccaaaaaccaacttaatactaataattaatcaatacataaatacaaaaacctaacctctctctc

SEQ ID NO: 212 - DNA, 120 bp, synthetic construct
  source 1..120: mol_type = other DNA
aatatttttggattggtttttggataaatagaattttttttttttaaatttatattttgagagttagtttgatattaatgattgattaatgtatgagtataaaaatttggtttttttttt

SEQ ID NO: 213 - DNA, 120 bp, synthetic construct
  source 1..120: mol_type = other DNA
aacactcctaaactaatccttaaacaaataaaaccttttttttctaaactcacacccgaaaaacaaacttaatactaataattaatcaatacataaatacaaaaacctaacctctctctc

SEQ ID NO: 214 - DNA, 120 bp, synthetic construct
  source 1..120: mol_type = other DNA
aatatttttggattggtttttggataaatagaattttttttttttaaatttatattcggagagtaagtttgatattaatgattgattaatgtatgagtataaaaatttggtttttttttc

SEQ ID NO: 215 - DNA, 120 bp, synthetic construct
  source 1..120: mol_type = other DNA
aacactcctaaactaatccttaaacaaataaaaccttttttttctaaactcacaccccgaaaaccaacttaatactaataattaatcaatacataaatacaaaaacctaacctctctctc

SEQ ID NO: 216 - DNA, 120 bp, synthetic construct
  source 1..120: mol_type = other DNA
aatatttttggattggtttttggataaatagaattttttttttttaaatttatatttcgagagttagtttgatattaatgattgattaatgtatgagtataaaaatttggtttttttttc

SEQ ID NO: 217 - DNA, 120 bp, synthetic construct
  source 1..120: mol_type = other DNA
tataattttaaaataaataataatacaaaatcatcctacaaaatcctccaacaacaacctaaaaatataaatattataacctcactttaaaaaataaaaaacttaatttctaaacattaa

SEQ ID NO: 218 - DNA, 120 bp, synthetic construct
  source 1..120: mol_type = other DNA
tgtagttttggagtagatagtaatataaaattattttatagaattttttgataataatttgagaatgtaggtattataattttattttagagaataggaaatttgatttttaagtattag

SEQ ID NO: 219 - DNA, 120 bp, synthetic construct
  source 1..120: mol_type = other DNA
tataattttaaaataaataataatacaaaatcatcctacaaaatcctccaacaacaaactaaaattataaatattataacctcactttaaaaaataaaaaacttaatttctaaacattaa

SEQ ID NO: 220 - DNA, 120 bp, synthetic construct
  source 1..120: mol_type = other DNA
tgtagttttggagtagatagtaatataaaattattttatagaattttttgataataaattgagattgtaggtattataattttattttagagaataggaaatttgatttttaagtattag

SEQ ID NO: 221 - DNA, 120 bp, synthetic construct
  source 1..120: mol_type = other DNA
tataattttaaaataaataataatacaaaatcatcctacaaaatcctccgacaacaacctaaaaatataaatattataacctcactttaaaaaataaaaaacttaatttctaaacattaa

SEQ ID NO: 222 - DNA, 120 bp, synthetic construct
  source 1..120: mol_type = other DNA
tgtagttttggagtagatagtaatataaaattattttatagaatttttcgataataatttgagaatgtaggtattataattttattttagagaataggaaatttgatttttaagtattag

SEQ ID NO: 223 - DNA, 120 bp, synthetic construct
  source 1..120: mol_type = other DNA
tataattttaaaataaataataatacaaaatcatcctacaaaatcctccgacaacaaactaaaattataaatattataacctcactttaaaaaataaaaaacttaatttctaaacattaa

SEQ ID NO: 224 - DNA, 120 bp, synthetic construct
  source 1..120: mol_type = other DNA
tgtagttttggagtagatagtaatataaaattattttatagaatttttcgataataaattgagattgtaggtattataattttattttagagaataggaaatttgatttttaagtattag

SEQ ID NO: 225 - DNA, 120 bp, synthetic construct
  source 1..120: mol_type = other DNA
caaaaataactttaatcttaaattcaattaattaaaccttaaaaaattacaaacccctataaatccaaactccctactcctttctattcactaacattctaaactcattcaccacacaca

SEQ ID NO: 226 - DNA, 120 bp, synthetic construct
  source 1..120: mol_type = other DNA
taaaggtgattttgattttgaatttagttaattgagttttaggagattatggatttttgtaaatttaagttttttgtttttttttatttattggtattttagatttatttattatatata

SEQ ID NO: 227 - DNA, 120 bp, synthetic construct
  source 1..120: mol_type = other DNA
caaaaataactttaatcttaaattcaattaattaaaccttaaaaaattacaaacccctaaatatccaaactccctactcctttctattcactaacattctaaactcattcaccacacaca

SEQ ID NO: 228 - DNA, 120 bp, synthetic construct
  source 1..120: mol_type = other DNA
taaaggtgattttgattttgaatttagttaattgagttttaggagattatggatttttggatatttaagttttttgtttttttttatttattggtattttagatttatttattatatata

SEQ ID NO: 229 - DNA, 120 bp, synthetic construct
  source 1..120: mol_type = other DNA
caaaaataactttaatcttaaattcaattaattaaaccttaaaaaattacgaacccctataaatccaaactccctactcctttctattcactaacattctaaactcattcaccacacaca

SEQ ID NO: 230 - DNA, 120 bp, synthetic construct
  source 1..120: mol_type = other DNA
taaaggtgattttgattttgaatttagttaattgagttttaggagattacggatttttgtaaatttaagttttttgtttttttttatttattggtattttagatttatttattatatata

SEQ ID NO: 231 - DNA, 120 bp, synthetic construct
  source 1..120: mol_type = other DNA
caaaaataactttaatcttaaattcaattaattaaaccttaaaaaattacgaacccctaaatatccaaactccctactcctttctattcactaacattctaaactcattcaccacacaca

SEQ ID NO: 232 - DNA, 120 bp, synthetic construct
  source 1..120: mol_type = other DNA
taaaggtgattttgattttgaatttagttaattgagttttaggagattacggatttttggatatttaagttttttgtttttttttatttattggtattttagatttatttattatatata

SEQ ID NO: 233 - DNA, 120 bp, synthetic construct
  source 1..120: mol_type = other DNA
cacctaaacaaataatcataaatccctttaaaaaaaaataaaacaaatcatctcaatataaacttattacaatattacaaaatacttattcttaaaaacctaactatctttttaatcaat

SEQ ID NO: 234 - DNA, 120 bp, synthetic construct
  source 1..120: mol_type = other DNA
tatttaagtaaatggttgtgggtttttttagggaaggatgggataagttattttgatataaatttgttgtagtgttgtagggtatttatttttagggatttggttgtttttttagttaat

SEQ ID NO: 235 - DNA, 120 bp, synthetic construct
  source 1..120: mol_type = other DNA
cacctaaacaaataatcataaatccctttaaaaaaaaataaaacaaatcatctcaatattatcttattacaatattacaaaatacttattcttaaaaacctaactatctttttaatcaat

SEQ ID NO: 236 - DNA, 120 bp, synthetic construct
  source 1..120: mol_type = other DNA
tatttaagtaaatggttgtgggtttttttagggaaggatgggataagttattttgatattattttgttgtagtgttgtagggtatttatttttagggatttggttgtttttttagttaat

SEQ ID NO: 237 - DNA, 120 bp, synthetic construct
  source 1..120: mol_type = other DNA
cacctaaacaaataatcgtaaatccctttaaaaaaaaataaaacaaatcatctcgatataaacttattacaatattacaaaatacttattcttaaaaacctaactatctttttaatcaat

SEQ ID NO: 238 - DNA, 120 bp, synthetic construct
  source 1..120: mol_type = other DNA
tatttaagtaaatggtcgtgggtttttttagggaaggatgggataagttatttcgatataaatttgttgtagtgttgtagggtatttatttttagggatttggttgtttttttagttaat

SEQ ID NO: 239 - DNA, 120 bp, synthetic construct
  source 1..120: mol_type = other DNA
cacctaaacaaataatcgtaaatccctttaaaaaaaaataaaacaaatcatctcgatattatcttattacaatattacaaaatacttattcttaaaaacctaactatctttttaatcaat

SEQ ID NO: 240 - DNA, 120 bp, synthetic construct
  source 1..120: mol_type = other DNA
tatttaagtaaatggtcgtgggtttttttagggaaggatgggataagttatttcgatattattttgttgtagtgttgtagggtatttatttttagggatttggttgtttttttagttaat

SEQ ID NO: 241 - DNA, 120 bp, synthetic construct
  source 1..120: mol_type = other DNA
ctaaacttacaaaaaattaacaaataaaaattattatataaaaaataacaacaaataacatattataaatatcaacaaaacaccctacatatttccaaatcctttatattcattatcatc

SEQ ID NO: 242 - DNA, 120 bp, synthetic construct
  source 1..120: mol_type = other DNA
ttaaatttgtagagagttaataagtaaaagttgttgtgtggaaaataatgataggtagtatattgtgaatattggtgaagtgttttgtatatttttaagttttttatatttattattatt

SEQ ID NO: 243 - DNA, 120 bp, synthetic construct
  source 1..120: mol_type = other DNA
ctaaacttacaaaaaattaacaaataaaaattattatataaaaaataacaacaaataccatattctaaatatcaacaaaacaccctacatatttccaaatcctttatattcattatcatc

SEQ ID NO: 244 - DNA, 120 bp, synthetic construct
  source 1..120: mol_type = other DNA
ttaaatttgtagagagttaataagtaaaagttgttgtgtggaaaataatgataggtattatattttgaatattggtgaagtgttttgtatatttttaagttttttatatttattattatt

SEQ ID NO: 245 - DNA, 120 bp, synthetic construct
  source 1..120: mol_type = other DNA
ctaaacttacaaaaaattaacaaataaaaattattatataaaaaataacgacaaataacatattataaatatcgacgaaacgccctacatatttccaaatcctttatattcattatcatc

SEQ ID NO: 246 - DNA, 120 bp, synthetic construct
  source 1..120: mol_type = other DNA
ttaaatttgtagagagttaataagtaaaagttgttgtgtggaaaataacgataggtagtatattgtgaatatcggcgaagcgttttgtatatttttaagttttttatatttattattatt

SEQ ID NO: 247 - DNA, 120 bp, synthetic construct
  source 1..120: mol_type = other DNA
ctaaacttacaaaaaattaacaaataaaaattattatataaaaaataacgacaaataccatattctaaatatcgacgaaacgccctacatatttccaaatcctttatattcattatcatc

SEQ ID NO: 248 - DNA, 120 bp, synthetic construct
  source 1..120: mol_type = other DNA
ttaaatttgtagagagttaataagtaaaagttgttgtgtggaaaataacgataggtattatattttgaatatcggcgaagcgttttgtatatttttaagttttttatatttattattatt

SEQ ID NO: 249 - DNA, 120 bp, synthetic construct
  source 1..120: mol_type = other DNA
attttacactatttttcaaaattactaaaatatattaacattcttcacattcttccacataaaacaataattttctcattctccaaaactcaataaataaaaaaaaaaaactaattattc

SEQ ID NO: 250 - DNA, 120 bp, synthetic construct
  source 1..120: mol_type = other DNA
attttatattgttttttagagttattaaaatgtattaatattttttatatttttttatatgaagtaatggtttttttattttttagagtttaatgggtaaaggagagaagttgattattt

SEQ ID NO: 251 - DNA, 120 bp, synthetic construct
  source 1..120: mol_type = other DNA
attttacactatttttcaaaattactaaaatatattaacattcttcacattcttccacattcaacaataattttctcattctccaaaactcaataaataaaaaaaaaaaactaattattc

SEQ ID NO: 252 - DNA, 120 bp, synthetic construct
  source 1..120: mol_type = other DNA
attttatattgttttttagagttattaaaatgtattaatattttttatatttttttatatttagtaatggtttttttattttttagagtttaatgggtaaaggagagaagttgattattt

SEQ ID NO: 253 - DNA, 120 bp, synthetic construct; identical to SEQ ID NO: 249
  source 1..120: mol_type = other DNA

SEQ ID NO: 254 - DNA, 120 bp, synthetic construct; identical to SEQ ID NO: 250
  source 1..120: mol_type = other DNA

SEQ ID NO: 255 - DNA, 120 bp, synthetic construct; identical to SEQ ID NO: 251
  source 1..120: mol_type = other DNA

SEQ ID NO: 256 - DNA, 120 bp, synthetic construct; identical to SEQ ID NO: 252
  source 1..120: mol_type = other DNA

SEQ ID NO: 257 - DNA, 120 bp, synthetic construct
  source 1..120: mol_type = other DNA
aaaaaattatattttatacatacccccaaaaatatactaattttataacttaaaaacatattcactaaccccaaattaactaaaatttaaatactaactcaaatatttacccactaaata

SEQ ID NO: 258 - DNA, 120 bp, synthetic construct
  source 1..120: mol_type = other DNA
agaagattatattttatatatgtttttaaaaatgtattgattttatggtttaaggatatatttattggttttagattaattaaggtttgaatattgatttgaatatttgtttattgagtg

SEQ ID NO: 259 - DNA, 120 bp, synthetic construct
  source 1..120: mol_type = other DNA
aaaaaattatattttatacatacccccaaaaatatactaattttataacttaaaaacataaacactaaccccaaattaactaaaatttaaatactaactcaaatatttacccactaaata

SEQ ID NO: 260 - DNA, 120 bp, synthetic construct
  source 1..120: mol_type = other DNA
agaagattatattttatatatgtttttaaaaatgtattgattttatggtttaaggatatagatattggttttagattaattaaggtttgaatattgatttgaatatttgtttattgagtg

SEQ ID NO: 261 - DNA, 120 bp, synthetic construct
  source 1..120: mol_type = other DNA
aaaaaattatattttatacatacccccaaaaatatactaattttataacttaaaaacatattcactaaccccaaattaactaaaatttaaatactaactcgaatatttacccactaaata

SEQ ID NO: 262 - DNA, 120 bp, synthetic construct
  source 1..120: mol_type = other DNA
agaagattatattttatatatgtttttaaaaatgtattgattttatggtttaaggatatatttattggttttagattaattaaggtttgaatattgattcgaatatttgtttattgagtg

SEQ ID NO: 263 - DNA, 120 bp, synthetic construct
  source 1..120: mol_type = other DNA
aaaaaattatattttatacatacccccaaaaatatactaattttataacttaaaaacataaacactaaccccaaattaactaaaatttaaatactaactcgaatatttacccactaaata

SEQ ID NO: 264 - DNA, 120 bp, synthetic construct
  source 1..120: mol_type = other DNA
agaagattatattttatatatgtttttaaaaatgtattgattttatggtttaaggatatagatattggttttagattaattaaggtttgaatattgattcgaatatttgtttattgagtg

SEQ ID NO: 265 - DNA, 120 bp, synthetic construct
  source 1..120: mol_type = other DNA
caaaaataaccttctccttaatatttacaaaataataataacatattctaaataaaacactttaatctccctctaacacaactcttaacaataacaaaaaataatataaaccaaaaataa

SEQ ID NO: 266 - DNA, 120 bp, synthetic construct
  source 1..120: mol_type = other DNA
taagggtggttttttttttagtgtttgtaagataatgatggtgtattttgaatagaatattttggtttttttttgatatagtttttgataatgataggagatggtgtaaattaaaaataa

SEQ ID NO: 267 - DNA, 120 bp, synthetic construct
  source 1..120: mol_type = other DNA
caaaaataaccttctccttaatatttacaaaataataataacatattctaaataaaacacaataatctccctctaacacaactcttaacaataacaaaaaataatataaaccaaaaataa

SEQ ID NO: 268 - DNA, 120 bp, synthetic construct
  source 1..120: mol_type = other DNA
taagggtggttttttttttagtgtttgtaagataatgatggtgtattttgaatagaatatagtggtttttttttgatatagtttttgataatgataggagatggtgtaaattaaaaataa

SEQ ID NO: 269 - DNA, 120 bp, synthetic construct
  source 1..120: mol_type = other DNA
caaaaataaccttctccttaatatttacaaaataataataacgtattctaaataaaacactttaatctccctctaacacaactcttaacaataacaaaaaataatataaaccaaaaataa

SEQ ID NO: 270 - DNA, 120 bp, synthetic construct
  source 1..120: mol_type = other DNA
taagggtggttttttttttagtgtttgtaagataatgatggcgtattttgaatagaatattttggtttttttttgatatagtttttgataatgataggagatggtgtaaattaaaaataa

SEQ ID NO: 271 - DNA, 120 bp, synthetic construct
  source 1..120: mol_type = other DNA
caaaaataaccttctccttaatatttacaaaataataataacgtattctaaataaaacacaataatctccctctaacacaactcttaacaataacaaaaaataatataaaccaaaaataa

SEQ ID NO: 272 - DNA, 120 bp, synthetic construct
  source 1..120: mol_type = other DNA
taagggtggttttttttttagtgtttgtaagataatgatggcgtattttgaatagaatatagtggtttttttttgatatagtttttgataatgataggagatggtgtaaattaaaaataa

SEQ ID NO: 273 - DNA, 120 bp, synthetic construct
  source 1..120: mol_type = other DNA
tataaaaaatttttaaaacattaattacacaactaaaacaatttccttcctattcacttaaacaaatacccaaaacatatattccttccccttatacatttaaattttaaaaataaaaat

SEQ ID NO: 274 - DNA, 120 bp, synthetic construct
  source 1..120: mol_type = other DNA
tgtgagaagtttttagagtattagttgtataattaaaataattttttttttatttgtttaggtaagtatttaagatatatattttttttttttgtgtatttagattttaaaaataaaagt

SEQ ID NO: 275 - DNA, 120 bp, synthetic construct
  source 1..120: mol_type = other DNA
tataaaaaatttttaaaacattaattacacaactaaaacaatttccttcctattcacttacccaaatacccaaaacatatattccttccccttatacatttaaattttaaaaataaaaat

SEQ ID NO: 276 - DNA, 120 bp, synthetic construct
  source 1..120: mol_type = other DNA
tgtgagaagtttttagagtattagttgtataattaaaataattttttttttatttgtttatttaagtatttaagatatatattttttttttttgtgtatttagattttaaaaataaaagt

SEQ ID NO: 277 - DNA, 120 bp, synthetic construct
  source 1..120: mol_type = other DNA
tataaaaaatttttaaaacattaattacacaactaaaacaatttccttcctattcgcttaaacaaatacccaaaacatatattccttccccttatacatttaaattttaaaaataaaaat

SEQ ID NO: 278 - DNA, 120 bp, synthetic construct
  source 1..120: mol_type = other DNA
tgtgagaagtttttagagtattagttgtataattaaaataattttttttttattcgtttaggtaagtatttaagatatatattttttttttttgtgtatttagattttaaaaataaaagt

SEQ ID NO: 279 - DNA, 120 bp, synthetic construct
  source 1..120: mol_type = other DNA
tataaaaaatttttaaaacattaattacacaactaaaacaatttccttcctattcgcttacccaaatacccaaaacatatattccttccccttatacatttaaattttaaaaataaaaat

SEQ ID NO: 280 - DNA, 120 bp, synthetic construct
  source 1..120: mol_type = other DNA
tgtgagaagtttttagagtattagttgtataattaaaataattttttttttattcgtttatttaagtatttaagatatatattttttttttttgtgtatttagattttaaaaataaaagt

SEQ ID NO: 281 - DNA, 120 bp, synthetic construct
  source 1..120: mol_type = other DNA
aaaaatataactcctaattcctactttaccacttcacaactatataactataaaaaaaacaatttacctctcttttcctcaaaataaaataaaaaaattaaactcaataataatctttca

SEQ ID NO: 282 - DNA, 120 bp, synthetic construct
  source 1..120: mol_type = other DNA
gaagatatgatttttagtttttgttttattattttgtagttgtgtgattataggaaagatagtttgttttttttttttttaaagtaaaatgaaggagttgaatttagtgatagtttttta

SEQ ID NO: 283 - DNA, 120 bp, synthetic construct
  source 1..120: mol_type = other DNA
aaaaatataactcctaattcctactttaccacttcacaactatataactataaaaaaaaccctttacctctcttttcctcaaaataaaataaaaaaattaaactcaataataatctttca

SEQ ID NO: 284 - DNA, 120 bp, synthetic construct
  source 1..120: mol_type = other DNA
gaagatatgatttttagtttttgttttattattttgtagttgtgtgattataggaaagattttttgttttttttttttttaaagtaaaatgaaggagttgaatttagtgatagtttttta

SEQ ID NO: 285 - DNA, 120 bp, synthetic construct
  source 1..120: mol_type = other DNA
aaaaatataactcctaattcctactttaccacttcgcaactatataactataaaaaaaacaatttacctctcttttcctcaaaataaaataaaaaaattaaactcaataataatctttca

SEQ ID NO: 286 - DNA, 120 bp, synthetic construct
  source 1..120: mol_type = other DNA
gaagatatgatttttagtttttgttttattatttcgtagttgtgtgattataggaaagatagtttgttttttttttttttaaagtaaaatgaaggagttgaatttagtgatagtttttta

SEQ ID NO: 287 - DNA, 120 bp, synthetic construct
  source 1..120: mol_type = other DNA
aaaaatataactcctaattcctactttaccacttcgcaactatataactataaaaaaaaccctttacctctcttttcctcaaaataaaataaaaaaattaaactcaataataatctttca

SEQ ID NO: 288 - DNA, 120 bp, synthetic construct
  source 1..120: mol_type = other DNA
gaagatatgatttttagtttttgttttattatttcgtagttgtgtgattataggaaagattttttgttttttttttttttaaagtaaaatgaaggagttgaatttagtgatagtttttta

SEQ ID NO: 289 - DNA, 120 bp, synthetic construct
  source 1..120: mol_type = other DNA
tttaaaaaaatttaaaaaaaatactaatatttaaaccccaactaaatcaaaatctcaaaattaaaccaaacatcaatatacattattatttccaaaattcctaaataattctattacatc

SEQ ID NO: 290 - DNA, 120 bp, synthetic construct
  source 1..120: mol_type = other DNA
tttggagaggtttaaaaaaaatattgatatttaggttttaattaaattagaattttgggattgaattaggtattagtgtgtattgttgtttttaagatttttaggtgattttattgtatt

SEQ ID NO: 291 - DNA, 120 bp, synthetic construct
  source 1..120: mol_type = other DNA
tttaaaaaaatttaaaaaaaatactaatatttaaaccccaactaaatcaaaatctcaaaaaaaaaccaaacatcaatatacattattatttccaaaattcctaaataattctattacatc

SEQ ID NO: 292 - DNA, 120 bp, synthetic construct
  source 1..120: mol_type = other DNA
tttggagaggtttaaaaaaaatattgatatttaggttttaattaaattagaattttgggagagaattaggtattagtgtgtattgttgtttttaagatttttaggtgattttattgtatt

SEQ ID NO: 293 - DNA, 120 bp, synthetic construct
  source 1..120: mol_type = other DNA
tttaaaaaaatttaaaaaaaatactaatatttaaaccccaactaaatcaaaatctcgaaattaaaccaaacatcaatatacattattatttccaaaattcctaaataattctattacatc

SEQ ID NO: 294 - DNA, 120 bp, synthetic construct
  source 1..120: mol_type = other DNA
tttggagaggtttaaaaaaaatattgatatttaggttttaattaaattagaatttcgggattgaattaggtattagtgtgtattgttgtttttaagatttttaggtgattttattgtatt

SEQ ID NO: 295 - DNA, 120 bp, synthetic construct
  source 1..120: mol_type = other DNA
tttaaaaaaatttaaaaaaaatactaatatttaaaccccaactaaatcaaaatctcgaaaaaaaaccaaacatcaatatacattattatttccaaaattcctaaataattctattacatc

SEQ ID NO: 296 - DNA, 120 bp, synthetic construct
  source 1..120: mol_type = other DNA
tttggagaggtttaaaaaaaatattgatatttaggttttaattaaattagaatttcgggagagaattaggtattagtgtgtattgttgtttttaagatttttaggtgattttattgtatt

SEQ ID NO: 297 - DNA, 120 bp, synthetic construct
  source 1..120: mol_type = other DNA
ccaaaccctcattactataccatcaaaaccctactcactataccctccttaaaaccaataatctacactattccttcactatcaactttaaacaaacaaacactaaaaaataccccaata

SEQ ID NO: 298 - DNA, 120 bp, synthetic construct
  source 1..120: mol_type = other DNA
ttaggtttttattattgtgttattgaagttttgtttattatgttttttttagggttaatgatttgtattgtttttttattgttaattttagataggtgaatattaagagatgttttagta

SEQ ID NO: 299 - DNA, 120 bp, synthetic construct
  source 1..120: mol_type = other DNA
ccaaaccctcattactataccatcaaaaccctactcactataccctccttaaaaccaatatactacactattccttcactatcaactttaaacaaacaaacactaaaaaataccccaata

SEQ ID NO: 300 - DNA, 120 bp, synthetic construct
  source 1..120: mol_type = other DNA
ttaggtttttattattgtgttattgaagttttgtttattatgttttttttagggttaatgtgttgtattgtttttttattgttaattttagataggtgaatattaagagatgttttagta

SEQ ID NO: 301 - DNA, 120 bp, synthetic construct
  source 1..120: mol_type = other DNA
ccaaaccctcattactataccatcgaaaccctactcactataccctccttaaaaccaataatctacactattccttcactatcaactttaaacaaacgaacactaaaaaataccccaata

SEQ ID NO: 302 - DNA, 120 bp, synthetic construct
  source 1..120: mol_type = other DNA
ttaggtttttattattgtgttatcgaagttttgtttattatgttttttttagggttaatgatttgtattgtttttttattgttaattttagataggcgaatattaagagatgttttagta

SEQ ID NO: 303 - DNA, 120 bp, synthetic construct
  source 1..120: mol_type = other DNA
ccaaaccctcattactataccatcgaaaccctactcactataccctccttaaaaccaatatactacactattccttcactatcaactttaaacaaacgaacactaaaaaataccccaata

SEQ ID NO: 304 - DNA, 120 bp, synthetic construct
  source 1..120: mol_type = other DNA
ttaggtttttattattgtgttatcgaagttttgtttattatgttttttttagggttaatgtgttgtattgtttttttattgttaattttagataggcgaatattaagagatgttttagta

SEQ ID NO: 305 - DNA, 120 bp, synthetic construct
  source 1..120: mol_type = other DNA
aaactaaaaataaaaaaacaaaattacaacaaaaacatacatatctacaaactaacaacaaaaatttccatctcaacaataaaaatcacatcaaatacatataaaaaataaaataaacat

SEQ ID NO: 306 - DNA, 120 bp, synthetic construct
  source 1..120: mol_type = other DNA
agattagggatgaaaggataaggttgtagtagagatatgtatgtttataggttgatgatagaggtttttattttaatagtgaagattatattaaatgtatgtaaggggtgaggtgggtat

SEQ ID NO: 307 - DNA, 120 bp, synthetic construct
  source 1..120: mol_type = other DNA
aaactaaaaataaaaaaacaaaattacaacaaaaacatacatatctacaaactaacaacattaatttccatctcaacaataaaaatcacatcaaatacatataaaaaataaaataaacat

SEQ ID NO: 308 - DNA, 120 bp, synthetic construct
  source 1..120: mol_type = other DNA
agattagggatgaaaggataaggttgtagtagagatatgtatgtttataggttgatgatattggtttttattttaatagtgaagattatattaaatgtatgtaaggggtgaggtgggtat

SEQ ID NO: 309 - DNA, 120 bp, synthetic construct
  source 1..120: mol_type = other DNA
aaactaaaaataaaaaaacaaaattacaacaaaaacatacatatctacaaactaacgacaaaaatttccatctcaacaataaaaatcacatcaaatacatataaaaaataaaataaacat

SEQ ID NO: 310 - DNA, 120 bp, synthetic construct
  source 1..120: mol_type = other DNA
agattagggatgaaaggataaggttgtagtagagatatgtatgtttataggttgacgatagaggtttttattttaatagtgaagattatattaaatgtatgtaaggggtgaggtgggtat

SEQ ID NO: 311 - DNA, 120 bp, synthetic construct
  source 1..120: mol_type = other DNA
aaactaaaaataaaaaaacaaaattacaacaaaaacatacatatctacaaactaacgacattaatttccatctcaacaataaaaatcacatcaaatacatataaaaaataaaataaacat

SEQ ID NO: 312 - DNA, 120 bp, synthetic construct
  source 1..120: mol_type = other DNA
agattagggatgaaaggataaggttgtagtagagatatgtatgtttataggttgacgatattggtttttattttaatagtgaagattatattaaatgtatgtaaggggtgaggtgggtat

SEQ ID NO: 313 - DNA, 120 bp, synthetic construct
  source 1..120: mol_type = other DNA
aaaaaccatacattttatactttaaaataaaaatctccccttttttaaataaatatacactttcaataatacatccaaactacaaaaaacatataaactacacataaaataaaaccaatt

SEQ ID NO: 314 - DNA, 120 bp, synthetic construct
  source 1..120: mol_type = other DNA
ggaagttatatattttgtattttaagataaaaatttttttttttttggatgaatgtgtgtttttagtaatatatttaggttatagaggatgtgtgaattatatataaaataaaattaatt

SEQ ID NO: 315 - DNA, 120 bp, synthetic construct
  source 1..120: mol_type = other DNA
aaaaaccatacattttatactttaaaataaaaatctccccttttttaaataaatatactcttacaataatacatccaaactacaaaaaacatataaactacacataaaataaaaccaatt

SEQ ID NO: 316 - DNA, 120 bp, synthetic construct
  source 1..120: mol_type = other DNA
ggaagttatatattttgtattttaagataaaaatttttttttttttggatgaatgtgtttttgtagtaatatatttaggttatagaggatgtgtgaattatatataaaataaaattaatt

SEQ ID NO: 317 - DNA, 120 bp, synthetic construct
  source 1..120: mol_type = other DNA
aaaaaccatacattttatactttaaaataaaaatctccccttttttaaataaatatacgctttcaataatacatccaaactacaaaaaacgtataaactacacataaaataaaaccaatt

SEQ ID NO: 318 - DNA, 120 bp, synthetic construct
  source 1..120: mol_type = other DNA
ggaagttatatattttgtattttaagataaaaatttttttttttttggatgaatgtgcgtttttagtaatatatttaggttatagaggacgtgtgaattatatataaaataaaattaatt

SEQ ID NO: 319 - DNA, 120 bp, synthetic construct
  source 1..120: mol_type = other DNA
aaaaaccatacattttatactttaaaataaaaatctccccttttttaaataaatatactcttacaataatacatccaaactacaaaaaacgtataaactacacataaaataaaaccaatt

SEQ ID NO: 320 - DNA, 120 bp, synthetic construct
  source 1..120: mol_type = other DNA
ggaagttatatattttgtattttaagataaaaatttttttttttttggatgaatgtgtttttgtagtaatatatttaggttatagaggacgtgtgaattatatataaaataaaattaatt

SEQ ID NO: 321 - DNA, 120 bp, synthetic construct
  source 1..120: mol_type = other DNA
acaaacctaaatactaaaactacatataactctaaaataaaaatatctaaaataccacataattcttactaaaacaaatacttaacaatatattcctaaaaactaacattaaaaaaatac

SEQ ID NO: 322 - DNA, 120 bp, synthetic construct
  source 1..120: mol_type = other DNA
ataaatttagatattaaaattgtatgtgattttaaagtgaaaatatttgagatgttatatggtttttattgagataaatatttgatagtatatttttggggattaatgttaaagagatgt

SEQ ID NO: 323 - DNA, 120 bp, synthetic construct
  source 1..120: mol_type = other DNA
acaaacctaaatactaaaactacatataactctaaaataaaaatatctaaaataccacctaaatcttactaaaacaaatacttaacaatatattcctaaaaactaacattaaaaaaatac

SEQ ID NO: 324 - DNA, 120 bp, synthetic construct
  source 1..120: mol_type = other DNA
ataaatttagatattaaaattgtatgtgattttaaagtgaaaatatttgagatgttatttggattttattgagataaatatttgatagtatatttttggggattaatgttaaagagatgt

SEQ ID NO: 325 - DNA, 120 bp, synthetic construct
  source 1..120: mol_type = other DNA
acaaacctaaatactaaaactacatataactctaaaataaaaatatctaaaataccacataattcttactaaaacaaatacttaacaatatattcctaaaaactaacgttaaaaaaatac

SEQ ID NO: 326 - DNA, 120 bp, synthetic construct
  source 1..120: mol_type = other DNA
ataaatttagatattaaaattgtatgtgattttaaagtgaaaatatttgagatgttatatggtttttattgagataaatatttgatagtatatttttggggattaacgttaaagagatgt

SEQ ID NO: 327 - DNA, 120 bp, synthetic construct
  source 1..120: mol_type = other DNA
acaaacctaaatactaaaactacatataactctaaaataaaaatatctaaaataccacctaaatcttactaaaacaaatacttaacaatatattcctaaaaactaacgttaaaaaaatac

SEQ ID NO: 328 - DNA, 120 bp, synthetic construct
  source 1..120: mol_type = other DNA
ataaatttagatattaaaattgtatgtgattttaaagtgaaaatatttgagatgttatttggattttattgagataaatatttgatagtatatttttggggattaacgttaaagagatgt

SEQ ID NO: 329 - DNA, 120 bp, synthetic construct
  source 1..120: mol_type = other DNA
aaccctaataatattaataccaataataaaactaacaaaaaaccttataatcaacttactacccactctataaacattaaaataaaccaaacaaaacccaaaaaacacaacttctccttt

SEQ ID NO: 330 - DNA, 120 bp, synthetic construct
  source 1..120: mol_type = other DNA
agttttggtagtattgatgttaatagtagagttagtagaaagttttgtaattagtttgttatttattttgtagatattgaggtgaattaagtagagtttagagggtatagtttttttttt

SEQ ID NO: 331 - DNA, 120 bp, synthetic construct
  source 1..120: mol_type = other DNA
aaccctaataatattaataccaataataaaactaacaaaaaaccttataatcaacttaataccaactctataaacattaaaataaaccaaacaaaacccaaaaaacacaacttctccttt

SEQ ID NO: 332 - DNA, 120 bp, synthetic construct
  source 1..120: mol_type = other DNA
agttttggtagtattgatgttaatagtagagttagtagaaagttttgtaattagtttgatattgattttgtagatattgaggtgaattaagtagagtttagagggtatagtttttttttt

SEQ ID NO: 333 - DNA, 120 bp, synthetic construct; identical to SEQ ID NO: 329
  source 1..120: mol_type = other DNA

SEQ ID NO: 334 - DNA, 120 bp, synthetic construct; identical to SEQ ID NO: 330
  source 1..120: mol_type = other DNA

SEQ ID NO: 335 - DNA, 120 bp, synthetic construct
  source 1..120: mol_type = other DNA
aaccctaataatattaataccaataataaaactaacaaaaaaccttataatcaacttaataccgactctataaacattaaaataaaccaaacaaaacccaaaaaacacaacttctccttt

SEQ ID NO: 336 - DNA, 120 bp, synthetic construct
  source 1..120: mol_type = other DNA
agttttggtagtattgatgttaatagtagagttagtagaaagttttgtaattagtttgatatcgattttgtagatattgaggtgaattaagtagagtttagagggtatagtttttttttt

SEQ ID NO: 337 - DNA, 120 bp, synthetic construct
  source 1..120: mol_type = other DNA
aaaataaattacacaaactaatataacccaacctcatacccaactctacatctaactaaaaatccacccccaaccccaaaccattaacttaaaaataaaaaaaaataatcttccaataaa

SEQ ID NO: 338 - DNA, 120 bp, synthetic construct
  source 1..120: mol_type = other DNA
gggatggattatatagattgatgtgatttagttttatgtttagttttgtatttaattggaggtttgtttttaattttaagttattgatttgagagtagaaagaggtggttttttagtgaa

SEQ ID NO: 339 - DNA, 120 bp, synthetic construct
  source 1..120: mol_type = other DNA
aaaataaattacacaaactaatataacccaacctcatacccaactctacatctaacaaaaaatcaacccccaaccccaaaccattaacttaaaaataaaaaaaaataatcttccaataaa

SEQ ID NO: 340 - DNA, 120 bp, synthetic construct
  source 1..120: mol_type = other DNA
gggatggattatatagattgatgtgatttagttttatgtttagttttgtatttaatgggaggttagtttttaattttaagttattgatttgagagtagaaagaggtggttttttagtgaa

SEQ ID NO: 341 - DNA, 120 bp, synthetic construct
  source 1..120: mol_type = other DNA
aaaataaattacacaaactaatataacccaacctcatacccaactctacatctaactaaaaatccgcccccaaccccaaaccattaacttaaaaataaaaaaaaataatcttccaataaa

SEQ ID NO: 342 - DNA, 120 bp, synthetic construct
  source 1..120: mol_type = other DNA
gggatggattatatagattgatgtgatttagttttatgtttagttttgtatttaattggaggttcgtttttaattttaagttattgatttgagagtagaaagaggtggttttttagtgaa

SEQ ID NO: 343 - DNA, 120 bp, synthetic construct
  source 1..120: mol_type = other DNA
aaaataaattacacaaactaatataacccaacctcatacccaactctacatctaacgaaaaatcaacccccaaccccaaaccattaacttaaaaataaaaaaaaataatcttccaataaa

SEQ ID NO: 344 - DNA, 120 bp, synthetic construct
  source 1..120: mol_type = other DNA
gggatggattatatagattgatgtgatttagttttatgtttagttttgtatttaacgggaggttagtttttaattttaagttattgatttgagagtagaaagaggtggttttttagtgaa

SEQ ID NO: 345 - DNA, 120 bp, synthetic construct
  source 1..120: mol_type = other DNA
tactcacaaaaaatacataataacattcatcacattctatatcatattatacaacaaaccttcccaaacatctacaaaattaacaaaattactaaaatccccttaaattcaattaaaaaa

SEQ ID NO: 346 - DNA, 120 bp, synthetic construct
  source 1..120: mol_type = other DNA
tatttataagaggtatataatagtatttattatattttgtattatgttatatgataaatttttttaagtatttgtagagttaataaaattattaaaatttttttaaatttagttaaagaa

SEQ ID NO: 347 - DNA, 120 bp, synthetic construct
  source 1..120: mol_type = other DNA
tactcacaaaaaatacataataacattcatcacattctatatcatattatacaacacaccttccccaacatctacaaaattaacaaaattactaaaatccccttaaattcaattaaaaaa

SEQ ID NO: 348 - DNA, 120 bp, synthetic construct
  source 1..120: mol_type = other DNA
tatttataagaggtatataatagtatttattatattttgtattatgttatatgatatattttttttagtatttgtagagttaataaaattattaaaatttttttaaatttagttaaagaa

SEQ ID NO: 349 - DNA, 120 bp, synthetic construct
  source 1..120: mol_type = other DNA
tactcacaaaaaatacataataacattcatcacattctatatcatattatacgacaaaccttcccaaacatctacaaaattaacaaaattactaaaatccccttaaattcaattaaaaaa

SEQ ID NO: 350 - DNA, 120 bp, synthetic construct
  source 1..120: mol_type = other DNA
tatttataagaggtatataatagtatttattatattttgtattatgttatacgataaatttttttaagtatttgtagagttaataaaattattaaaatttttttaaatttagttaaagaa

SEQ ID NO: 351 - DNA, 120 bp, synthetic construct
  source 1..120: mol_type = other DNA
tactcacaaaaaatacataataacattcatcacattctatatcatattatacgacacaccttccccaacatctacaaaattaacaaaattactaaaatccccttaaattcaattaaaaaa

SEQ ID NO: 352 - DNA, 120 bp, synthetic construct
  source 1..120: mol_type = other DNA
tatttataagaggtatataatagtatttattatattttgtattatgttatacgatatattttttttagtatttgtagagttaataaaattattaaaatttttttaaatttagttaaagaa

SEQ ID NO: 353 - DNA, 120 bp, synthetic construct
  source 1..120: mol_type = other DNA
aaaaaataaaaaacaaaataattttctcatattttcttcctaaacctcaatcaacccactttaaaaaaattacacccaactactaataaataaacaaaaccaaatataaaatctactact

SEQ ID NO: 354 - DNA, 120 bp, synthetic construct
  source 1..120: mol_type = other DNA
aagaggtaaaagataaaatgatttttttatattttttttttgaattttaattagtttattttaggaaaattgtatttagttgttggtaggtaggtaggattgagtgtgaagtttgttgtt

SEQ ID NO: 355 - DNA, 120 bp, synthetic construct
  source 1..120: mol_type = other DNA
aaaaaataaaaaacaaaataattttctcatattttcttcctaaacctcaatcaacccacattcaaaaaattacacccaactactaataaataaacaaaaccaaatataaaatctactact

SEQ ID NO: 356 - DNA, 120 bp, synthetic construct
  source 1..120: mol_type = other DNA
aagaggtaaaagataaaatgatttttttatattttttttttgaattttaattagtttatatttggaaaattgtatttagttgttggtaggtaggtaggattgagtgtgaagtttgttgtt

SEQ ID NO: 357 - DNA, 120 bp, synthetic construct
  source 1..120: mol_type = other DNA
aaaaaataaaaaacaaaataattttctcatattttcttcctaaacctcaatcaacccactttaaaaaaattacacccaactactaataaataaacaaaaccgaatataaaatctactact

SEQ ID NO: 358 - DNA, 120 bp, synthetic construct
  source 1..120: mol_type = other DNA
aagaggtaaaagataaaatgatttttttatattttttttttgaattttaattagtttattttaggaaaattgtatttagttgttggtaggtaggtaggatcgagtgtgaagtttgttgtt

SEQ ID NO: 359 - DNA, 120 bp, synthetic construct
  source 1..120: mol_type = other DNA
aaaaaataaaaaacaaaataattttctcatattttcttcctaaacctcaatcaacccacattcgaaaaattacacccaactactaataaataaacaaaaccgaatataaaatctactact

SEQ ID NO: 360 - DNA, 120 bp, synthetic construct
  source 1..120: mol_type = other DNA
aagaggtaaaagataaaatgatttttttatattttttttttgaattttaattagtttatattcggaaaattgtatttagttgttggtaggtaggtaggatcgagtgtgaagtttgttgtt

SEQ ID NO: 361 - DNA, 120 bp, synthetic construct
  source 1..120: mol_type = other DNA
aataattaacttaacttaataaaattcatttaatatactttaatttaaaaatttaaataaacactaactccaaaaaactaaaaaaattaaaatttttaaattacaaatacaatataaaaa

SEQ ID NO: 362 - DNA, 120 bp, synthetic construct
  source 1..120: mol_type = other DNA
aataattaatttggtttaatggaatttatttggtatattttaatttggagatttaagtaaatattgattttaggaggttagagaaattaggatttttagattatagatgtaatatggaga

SEQ ID NO: 363 - DNA, 120 bp, synthetic construct
  source 1..120: mol_type = other DNA
aataattaacttaacttaataaaattcatttaatatactttaatttaaaaatttaaattaacaataactccaaaaaactaaaaaaattaaaatttttaaattacaaatacaatataaaaa

SEQ ID NO: 364 - DNA, 120 bp, synthetic construct
  source 1..120: mol_type = other DNA
aataattaatttggtttaatggaatttatttggtatattttaatttggagatttaagttaatagtgattttaggaggttagagaaattaggatttttagattatagatgtaatatggaga

SEQ ID NO: 365 - DNA, 120 bp, synthetic construct; identical to SEQ ID NO: 361
  source 1..120: mol_type = other DNA

SEQ ID NO: 366 - DNA, 120 bp, synthetic construct; identical to SEQ ID NO: 362
  source 1..120: mol_type = other DNA

SEQ ID NO: 367 - DNA, 120 bp, synthetic construct; identical to SEQ ID NO: 363
  source 1..120: mol_type = other DNA

SEQ ID NO: 368 - DNA, 120 bp, synthetic construct; identical to SEQ ID NO: 364
  source 1..120: mol_type = other DNA

SEQ ID NO: 369 - DNA, 120 bp, synthetic construct
  source 1..120: mol_type = other DNA
tattaaaactataaaaaaaaacttttcatctactaatataaaaataacaataatcttactaaaactaaatccaataataataaaaaattactctcaataaatacttccctaactaacata

SEQ ID NO: 370 - DNA, 120 bp, synthetic construct
  source 1..120: mol_type = other DNA
tattaaaattataaaaagggattttttatttgttaatataaaagtaataatggttttattaggattaagtttaatagtagtaagaggttatttttagtaggtatttttttggttgatatg

SEQ ID NO: 371 - DNA, 120 bp, synthetic construct
  source 1..120: mol_type = other DNA
tattaaaactataaaaaaaaacttttcatctactaatataaaaataacaataatcttaataaatctaaatccaataataataaaaaattactctcaataaatacttccctaactaacata

SEQ ID NO: 372 - DNA, 120 bp, synthetic construct
  source 1..120: mol_type = other DNA
tattaaaattataaaaagggattttttatttgttaatataaaagtaataatggttttagtaggtttaagtttaatagtagtaagaggttatttttagtaggtatttttttggttgatatg

SEQ ID NO: 373 - DNA, 120 bp, synthetic construct; identical to SEQ ID NO: 369
  source 1..120: mol_type = other DNA

SEQ ID NO: 374 - DNA, 120 bp, synthetic construct; identical to SEQ ID NO: 370
  source 1..120: mol_type = other DNA

SEQ ID NO: 375 - DNA, 120 bp, synthetic construct; identical to SEQ ID NO: 371
  source 1..120: mol_type = other DNA

SEQ ID NO: 376 - DNA, 120 bp, synthetic construct; identical to SEQ ID NO: 372
  source 1..120: mol_type = other DNA

SEQ ID NO: 377 - DNA, 120 bp, synthetic construct
  source 1..120: mol_type = other DNA
aaacttaatacattattactattttccttccttctctcctcttctaaataaatcatacaaactcttttcaacaaaataaactcttaaataacaaaaacaataaaaaatcttaaaatctta

SEQ ID NO: 378 - DNA, 120 bp, synthetic construct
  source 1..120: mol_type = other DNA
gaatttaatatattgttattattttttttttttttttttttttttgggtgaattatatgggttttttttagtggaatgaatttttgggtaataagagtaataagaagttttgaggtttta

SEQ ID NO: 379 - DNA, 120 bp, synthetic construct
  source 1..120: mol_type = other DNA
aaacttaatacattattactattttccttccttctctcctcttctaaataaatcataccaactattttcaacaaaataaactcttaaataacaaaaacaataaaaaatcttaaaatctta

SEQ ID NO: 380 - DNA, 120 bp, synthetic construct
  source 1..120: mol_type = other DNA
gaatttaatatattgttattattttttttttttttttttttttttgggtgaattatattggttgtttttagtggaatgaatttttgggtaataagagtaataagaagttttgaggtttta

SEQ ID NO: 381 - DNA, 120 bp, synthetic construct
  source 1..120: mol_type = other DNA
aaacttaatacattattactattttccttccttctctcctcttctaaataaatcatacgaactcttttcaacgaaataaactcttaaataacaaaaacaataaaaaatcttaaaatctta

SEQ ID NO: 382 - DNA, 120 bp, synthetic construct
  source 1..120: mol_type = other DNA
gaatttaatatattgttattattttttttttttttttttttttttgggtgaattatacgggttttttttagcggaatgaatttttgggtaataagagtaataagaagttttgaggtttta

SEQ ID NO: 383 - DNA, 120 bp, synthetic construct
  source 1..120: mol_type = other DNA
aaacttaatacattattactattttccttccttctctcctcttctaaataaatcataccgactattttcaacgaaataaactcttaaataacaaaaacaataaaaaatcttaaaatctta

SEQ ID NO: 384 - DNA, 120 bp, synthetic construct
  source 1..120: mol_type = other DNA
gaatttaatatattgttattattttttttttttttttttttttttgggtgaattatatcggttgtttttagcggaatgaatttttgggtaataagagtaataagaagttttgaggtttta

SEQ ID NO: 385 - DNA, 120 bp, synthetic construct
  source 1..120: mol_type = other DNA
ctaaaaattacctaaaaaaccattctatcatttttaaacattctcaaaaaaacctacaaaaataccaaaattaataattactaaaatcactaactattaaaaaaaaataaacaaacaaaa

SEQ ID NO: 386 - DNA, 120 bp, synthetic construct
  source 1..120: mol_type = other DNA
ttggaggttgtttgaaaagttattttgttgtttttgagtatttttagaagagtttgtagaaatattgaaattggtagttgttgaaattattagttattggaagagggtgggtaaatgaga

SEQ ID NO: 387 - DNA, 120 bp, synthetic construct
  source 1..120: mol_type = other DNA
ctaaaaattacctaaaaaaccattctatcatttttaaacattctcaaaaaaacctaaaaaaatacaaaaattaataattactaaaatcactaactattaaaaaaaaataaacaaacaaaa

SEQ ID NO: 388 - DNA, 120 bp, synthetic construct
  source 1..120: mol_type = other DNA
ttggaggttgtttgaaaagttattttgttgtttttgagtatttttagaagagtttggagaaatatagaaattggtagttgttgaaattattagttattggaagagggtgggtaaatgaga

SEQ ID NO: 389 - DNA, 120 bp, synthetic construct
  source 1..120: mol_type = other DNA
ctaaaaattacctaaaaaaccattctatcgtttttaaacattctcaaaaaaacctacaaaaataccgaaattaataattactaaaatcactaactattaaaaaaaaataaacaaacgaaa

SEQ ID NO: 390 - DNA, 120 bp, synthetic construct
  source 1..120: mol_type = other DNA
ttggaggttgtttgaaaagttattttgtcgtttttgagtatttttagaagagtttgtagaaatatcgaaattggtagttgttgaaattattagttattggaagagggtgggtaaacgaga

SEQ ID NO: 391 - DNA, 120 bp, synthetic construct
  source 1..120: mol_type = other DNA
ctaaaaattacctaaaaaaccattctatcgtttttaaacattctcaaaaaaacctaaaaaaatacaaaaattaataattactaaaatcactaactattaaaaaaaaataaacaaacgaaa

SEQ ID NO: 392 - DNA, 120 bp, synthetic construct
  source 1..120: mol_type = other DNA
ttggaggttgtttgaaaagttattttgtcgtttttgagtatttttagaagagtttggagaaatatagaaattggtagttgttgaaattattagttattggaagagggtgggtaaacgaga

SEQ ID NO: 393 - DNA, 120 bp, synthetic construct
  source 1..120: mol_type = other DNA
acaaatataaacaaaatcaaataaatttcttatccctctattcctaacaaccattcatttctaaaattctctaaatttctaccaaaaataaacttttccaaactcacaaaaaattaatat

SEQ ID NO: 394 - DNA, 120 bp, synthetic construct
  source 1..120: mol_type = other DNA
gtaaatatgaataaaattaggtgaattttttatttttttgtttttaatagttatttatttttaggattttttgagtttttgttaagggtggatttttttaagtttataaaggattaatgt

SEQ ID NO: 395 - DNA, 120 bp, synthetic construct
  source 1..120: mol_type = other DNA
acaaatataaacaaaatcaaataaatttcttatccctctattcctaacaaccattaatttctaaacttctctaaatttctaccaaaaataaacttttccaaactcacaaaaaattaatat

SEQ ID NO: 396 - DNA, 120 bp, synthetic construct
  source 1..120: mol_type = other DNA
gtaaatatgaataaaattaggtgaattttttatttttttgtttttaatagttattgatttttaggtttttttgagtttttgttaagggtggatttttttaagtttataaaggattaatgt

SEQ ID NO: 397 - DNA, 120 bp, synthetic construct; identical to SEQ ID NO: 393
  source 1..120: mol_type = other DNA

SEQ ID NO: 398 - DNA, 120 bp, synthetic construct; identical to SEQ ID NO: 394
  source 1..120: mol_type = other DNA

SEQ ID NO: 399 - DNA, 120 bp, synthetic construct; identical to SEQ ID NO: 395
  source 1..120: mol_type = other DNA

SEQ ID NO: 400 - DNA, 120 bp, synthetic construct; identical to SEQ ID NO: 396
  source 1..120: mol_type = other DNA

SEQ ID NO: 401 - DNA, 120 bp, synthetic construct
  source 1..120: mol_type = other DNA
aaaaatccaaaataatttaataattttttacaaaaacatattaaatacatattaactatcaaaaaaacaatctaaaaataacaataataacaaaaatatacatttaaataaccaaataaa

SEQ ID NO: 402 - DNA, 120 bp, synthetic construct
  source 1..120: mol_type = other DNA
gaaagtttaaaatggtttaataattttttataaaaatatgttaaatgtatgttggttattgaaaagataatttaaaagtgataatagtagtaaagatgtgtatttaagtgattaaatgag

SEQ ID NO: 403 - DNA, 120 bp, synthetic construct
  source 1..120: mol_type = other DNA
aaaaatccaaaataatttaataattttttacaaaaacatattaaatacatattaaatatcaaaaatacaatctaaaaataacaataataacaaaaatatacatttaaataaccaaataaa

SEQ ID NO: 404 - DNA, 120 bp, synthetic construct
  source 1..120: mol_type = other DNA
gaaagtttaaaatggtttaataattttttataaaaatatgttaaatgtatgttgggtattgaaaatataatttaaaagtgataatagtagtaaagatgtgtatttaagtgattaaatgag

SEQ ID NO: 405 - DNA, 120 bp, synthetic construct
  source 1..120: mol_type = other DNA
aaaaatccaaaataatttaataattttttacaaaaacatattaaatacatattaactatcgaaaaaacaatctaaaaataacaataataacaaaaatatacatttaaataaccaaataaa

SEQ ID NO: 406 - DNA, 120 bp, synthetic construct
  source 1..120: mol_type = other DNA
gaaagtttaaaatggtttaataattttttataaaaatatgttaaatgtatgttggttatcgaaaagataatttaaaagtgataatagtagtaaagatgtgtatttaagtgattaaatgag

SEQ ID NO: 407 - DNA, 120 bp, synthetic construct
  source 1..120: mol_type = other DNA
aaaaatccaaaataatttaataattttttacaaaaacatattaaatacatattaaatatcgaaaatacaatctaaaaataacaataataacaaaaatatacatttaaataaccaaataaa

SEQ ID NO: 408 - DNA, 120 bp, synthetic construct
  source 1..120: mol_type = other DNA
gaaagtttaaaatggtttaataattttttataaaaatatgttaaatgtatgttgggtatcgaaaatataatttaaaagtgataatagtagtaaagatgtgtatttaagtgattaaatgag

SEQ ID NO: 409 - DNA, 120 bp, synthetic construct
  source 1..120: mol_type = other DNA
aattttattcaaaattataaatataatacttcatttcttatcaataaaaaaaaaatacattttttatctccatacataaataaaaactataaaatcaaactatctctaccatttaataat

SEQ ID NO: 410 - DNA, 120 bp, synthetic construct
  source 1..120: mol_type = other DNA
agttttgtttagggttgtaaatgtggtgttttattttttattagtgggaaagggatgtgttttttatttttatatataagtgagggttatggggttagattgtttttattatttaatggt

SEQ ID NO: 411 - DNA, 120 bp, synthetic construct
  source 1..120: mol_type = other DNA
aattttattcaaaattataaatataatacttcatttcttatcaataaaaaaaaaatactttttatatctccatacataaataaaaactataaaatcaaactatctctaccatttaataat

SEQ ID NO: 412 - DNA, 120 bp, synthetic construct
  source 1..120: mol_type = other DNA
agttttgtttagggttgtaaatgtggtgttttattttttattagtgggaaagggatgttttttgtatttttatatataagtgagggttatggggttagattgtttttattatttaatggt

SEQ ID NO: 413 - DNA, 120 bp, synthetic construct
  source 1..120: mol_type = other DNA
aattttattcaaaattataaatataatacttcatttcttatcaataaaaaaaaaatacgttttttatctccatacataaataaaaactataaaatcaaactatctctaccatttaataat

SEQ ID NO: 414 - DNA, 120 bp, synthetic construct
  source 1..120: mol_type = other DNA
agttttgtttagggttgtaaatgtggtgttttattttttattagtgggaaagggatgcgttttttatttttatatataagtgagggttatggggttagattgtttttattatttaatggt

SEQ ID NO: 415 - DNA, 120 bp, synthetic construct; identical to SEQ ID NO: 411
  source 1..120: mol_type = other DNA

SEQ ID NO: 416 - DNA, 120 bp, synthetic construct; identical to SEQ ID NO: 412
  source 1..120: mol_type = other DNA

SEQ ID NO: 417 - DNA, 120 bp, synthetic construct
  source 1..120: mol_type = other DNA
aaatataaataaatattaaaaaaaaaaattaaaaacattaaaaaaacaataatattaaaatataaaactccataaaatttcaaactaaaaaaacaaaacaaaaaaacaataaaaatcaaa

SEQ ID NO: 418 - DNA, 120 bp, synthetic construct
  source 1..120: mol_type = other DNA
aaatataagtaagtgttagagaaggaaattaaaggtattagagagatagtggtattgaagtatgggattttataagattttagattaggggaatgaaataggagaataatgaagattaaa

SEQ ID NO: 419 - DNA, 120 bp, synthetic construct
  source 1..120: mol_type = other DNA
aaatataaataaatattaaaaaaaaaaattaaaaacattaaaaaaacaataatattaaactttaaaactccataaaatttcaaactaaaaaaacaaaacaaaaaaacaataaaaatcaaa

SEQ ID NO: 420 - DNA, 120 bp, synthetic construct
  source 1..120: mol_type = other DNA
aaatataagtaagtgttagagaaggaaattaaaggtattagagagatagtggtattgaattttgggattttataagattttagattaggggaatgaaataggagaataatgaagattaaa

SEQ ID NO: 421 - DNA, 120 bp, synthetic construct
  source 1..120: mol_type = other DNA
aaatataaataaatattaaaaaaaaaaattaaaaacattaaaaaaacaataatattaaaatataaaactccataaaatttcaaactaaaaaaacgaaacaaaaaaacaataaaaatcaaa

SEQ ID NO: 422 - DNA, 120 bp, synthetic construct
  source 1..120: mol_type = other DNA
aaatataagtaagtgttagagaaggaaattaaaggtattagagagatagtggtattgaagtatgggattttataagattttagattaggggaacgaaataggagaataatgaagattaaa

SEQ ID NO: 423 - DNA, 120 bp, synthetic construct
  source 1..120: mol_type = other DNA
aaatataaataaatattaaaaaaaaaaattaaaaacattaaaaaaacaataatattaaactttaaaactccataaaatttcaaactaaaaaaacgaaacaaaaaaacaataaaaatcaaa

SEQ ID NO: 424 - DNA, 120 bp, synthetic construct
  source 1..120: mol_type = other DNA
aaatataagtaagtgttagagaaggaaattaaaggtattagagagatagtggtattgaattttgggattttataagattttagattaggggaacgaaataggagaataatgaagattaaa

SEQ ID NO: 425 - DNA, 120 bp, synthetic construct
  source 1..120: mol_type = other DNA
ttttataattattctataaatttataacaaaaatttataaaaacatttaatataaaaacatctcatttaatattaaaaaaaaaaaacccaactattcctttaaaccaatatttctactaa

SEQ ID NO: 426 - DNA, 120 bp, synthetic construct
  source 1..120: mol_type = other DNA
ttttatggttattttatgagtttatgatagggatttatggaagtatttgatatgaaggtgttttatttagtattgaagagaaaaagtttagttatttttttagattagtgtttttgttaa

SEQ ID NO: 427 - DNA, 120 bp, synthetic construct
  source 1..120: mol_type = other DNA
ttttataattattctataaatttataacaaaaatttataaaaacatttaatataaaaacttatcatttaatattaaaaaaaaaaaacccaactattcctttaaaccaatatttctactaa

SEQ ID NO: 428 - DNA, 120 bp, synthetic construct
  source 1..120: mol_type = other DNA
ttttatggttattttatgagtttatgatagggatttatggaagtatttgatatgaaggtttattatttagtattgaagagaaaaagtttagttatttttttagattagtgtttttgttaa

SEQ ID NO: 429 - DNA, 120 bp, synthetic construct
  source 1..120: mol_type = other DNA
ttttataattattctataaatttataacaaaaatttataaaaacatttaatataaaaacgtctcatttaatattaaaaaaaaaaaacccaactattcctttaaaccaatatttctactaa

SEQ ID NO: 430 - DNA, 120 bp, synthetic construct
  source 1..120: mol_type = other DNA
ttttatggttattttatgagtttatgatagggatttatggaagtatttgatatgaaggcgttttatttagtattgaagagaaaaagtttagttatttttttagattagtgtttttgttaa

SEQ ID NO: 431 - DNA, 120 bp, synthetic construct; identical to SEQ ID NO: 427
  source 1..120: mol_type = other DNA

SEQ ID NO: 432 - DNA, 120 bp, synthetic construct; identical to SEQ ID NO: 428
  source 1..120: mol_type = other DNA

SEQ ID NO: 433 - DNA, 120 bp, synthetic construct
  source 1..120: mol_type = other DNA
attaattaacatacatttccatatctaatctacctaattttactttaaaataaacaaataaaacctttaaaactaattacaattcttataataaaataataaaaaaaattttccatatca

SEQ ID NO: 434 - DNA, 120 bp, synthetic construct
  source 1..120: mol_type = other DNA
attgattgatatatatttttatgtttgatttatttgattttgttttaaaatgagtgagtaaaatttttgggattaattatgatttttatagtaaagtaatgagagagattttttatgttg

SEQ ID NO: 435 - DNA, 120 bp, synthetic construct
  source 1..120: mol_type = other DNA
attaattaacatacatttccatatctaatctacctaattttactttaaaataaacaaattatacctttaaaactaattacaattcttataataaaataataaaaaaaattttccatatca

SEQ ID NO: 436 - DNA, 120 bp, synthetic construct
  source 1..120: mol_type = other DNA
attgattgatatatatttttatgtttgatttatttgattttgttttaaaatgagtgagttatatttttgggattaattatgatttttatagtaaagtaatgagagagattttttatgttg

SEQ ID NO: 437 - DNA, 120 bp, synthetic construct
  source 1..120: mol_type = other DNA
attaattaacatacatttccatatctaatctacctaattttactttaaaataaacgaataaaacctttaaaactaattacgattcttataataaaataataaaaaaaattttccatatcg

SEQ ID NO: 438 - DNA, 120 bp, synthetic construct
  source 1..120: mol_type = other DNA
attgattgatatatatttttatgtttgatttatttgattttgttttaaaatgagcgagtaaaatttttgggattaattacgatttttatagtaaagtaatgagagagattttttatgtcg

SEQ ID NO: 439 - DNA, 120 bp, synthetic construct
  source 1..120: mol_type = other DNA
attaattaacatacatttccatatctaatctacctaattttactttaaaataaacgaattatacctttaaaactaattacgattcttataataaaataataaaaaaaattttccatatcg

SEQ ID NO: 440 - DNA, 120 bp, synthetic construct
  source 1..120: mol_type = other DNA
attgattgatatatatttttatgtttgatttatttgattttgttttaaaatgagcgagttatatttttgggattaattacgatttttatagtaaagtaatgagagagattttttatgtcg

SEQ ID NO: 441 - DNA, 120 bp, synthetic construct
  source 1..120: mol_type = other DNA
ttaattttaaataaattaaatttaaaatacctttaaaacattcaaaaaaactaacccattacatttaaaataacatccaaaaaccttactaacctaaccctaaaaacccactactactac

SEQ ID NO: 442 - DNA, 120 bp, synthetic construct
  source 1..120: mol_type = other DNA
ttggttttggatagattgaatttgaagtgtttttggggtatttagaaggattagtttattgtgtttagaataatatttagaagttttattagtttggttttgaaagtttattgttgttgt

SEQ ID NO: 443 - DNA, 120 bp, synthetic construct
  source 1..120: mol_type = other DNA
ttaattttaaataaattaaatttaaaatacctttaaaacattcaaaaaaactaacccataaaatttaaaataacatccaaaaaccttactaacctaaccctaaaaacccactactactac

SEQ ID NO: 444 - DNA, 120 bp, synthetic construct
  source 1..120: mol_type = other DNA
ttggttttggatagattgaatttgaagtgtttttggggtatttagaaggattagtttatggggtttagaataatatttagaagttttattagtttggttttgaaagtttattgttgttgt

SEQ ID NO: 445 - DNA, 120 bp, synthetic construct
  source 1..120: mol_type = other DNA
ttaattttaaataaattaaatttaaaatacctttaaaacattcaaaaaaactaacccattacgtttaaaataacatccaaaaaccttactaacctaaccctaaaaacccactactactac

SEQ ID NO: 446 - DNA, 120 bp, synthetic construct
  source 1..120: mol_type = other DNA
ttggttttggatagattgaatttgaagtgtttttggggtatttagaaggattagtttattgcgtttagaataatatttagaagttttattagtttggttttgaaagtttattgttgttgt

SEQ ID NO: 447 - DNA, 120 bp, synthetic construct; identical to SEQ ID NO: 443
  source 1..120: mol_type = other DNA

SEQ ID NO: 448 - DNA, 120 bp, synthetic construct; identical to SEQ ID NO: 444
  source 1..120: mol_type = other DNA

SEQ ID NO: 449 - DNA, 120 bp, synthetic construct
  source 1..120: mol_type = other DNA
aatctaataaataaacattaaacccatcaaaaaacctaaaaaccaaatctaaatcacttatacttcccacataaccctttctacaataattaataaaacctccccacataaaaaaaacta

SEQ ID NO: 450 - DNA, 120 bp, synthetic construct
  source 1..120: mol_type = other DNA
agtttggtaagtggatgttgaatttgttaaaaggtttgaaggttaggtttgaattatttgtattttttatgtggttttttttatggtgattagtgaagtttttttatataaagagagtta

SEQ ID NO: 451 - DNA, 120 bp, synthetic construct
  source 1..120: mol_type = other DNA
aatctaataaataaacattaaacccatcaaaaaacctaaaaaccaaatctaaatcacatatacatcccacataaccctttctacaataattaataaaacctccccacataaaaaaaacta

SEQ ID NO: 452 - DNA, 120 bp, synthetic construct
  source 1..120: mol_type = other DNA
agtttggtaagtggatgttgaatttgttaaaaggtttgaaggttaggtttgaattatgtgtatattttatgtggttttttttatggtgattagtgaagtttttttatataaagagagtta

SEQ ID NO: 453 - DNA, 120 bp, synthetic construct
  source 1..120: mol_type = other DNA
aatctaataaataaacgttaaacccgtcaaaaaacctaaaaaccaaatctaaatcacttatacttcccacgtaaccctttctacgataattaataaaacctccccacataaaaaaaacta

SEQ ID NO: 454 - DNA, 120 bp, synthetic construct
  source 1..120: mol_type = other DNA
agtttggtaagtggacgttgaattcgttaaaaggtttgaaggttaggtttgaattatttgtattttttacgtggttttttttacggtgattagtgaagtttttttatataaagagagtta

SEQ ID NO: 455 - DNA, 120 bp, synthetic construct
  source 1..120: mol_type = other DNA
aatctaataaataaacgttaaacccgtcaaaaaacctaaaaaccaaatctaaatcacgtatacatcccacgtaaccctttctacgataattaataaaacctccccacataaaaaaaacta

SEQ ID NO: 456 - DNA, 120 bp, synthetic construct
  source 1..120: mol_type = other DNA
agtttggtaagtggacgttgaattcgttaaaaggtttgaaggttaggtttgaattacgtgtatattttacgtggttttttttacggtgattagtgaagtttttttatataaagagagtta

SEQ ID NO: 457 - DNA, 120 bp, synthetic construct
  source 1..120: mol_type = other DNA
ctacctctaaactacaaaaaactttaattcaatatttaaacctatttcattttatactcaaaccaaaatttaacaatcataaaaattaattatattctctatacttaaataaataaattt

SEQ ID NO: 458 - DNA, 120 bp, synthetic construct
  source 1..120: mol_type = other DNA
ttatttttaggttgtaaagagttttgatttaatgtttgggtttgttttattttgtatttaggttaagatttaatagttatgagggttggttgtgttttttgtgtttaaatagatggattt

SEQ ID NO: 459 - DNA, 120 bp, synthetic construct
  source 1..120: mol_type = other DNA
ctacctctaaactacaaaaaactttaattcaatatttaaacctatttcattttatactctacccaaaatttaacaatcataaaaattaattatattctctatacttaaataaataaattt

SEQ ID NO: 460 - DNA, 120 bp, synthetic construct
  source 1..120: mol_type = other DNA
ttatttttaggttgtaaagagttttgatttaatgtttgggtttgttttattttgtattttgtttaagatttaatagttatgagggttggttgtgttttttgtgtttaaatagatggattt

SEQ ID NO: 461 - DNA, 120 bp, synthetic construct; identical to SEQ ID NO: 457
  source 1..120: mol_type = other DNA

SEQ ID NO: 462 - DNA, 120 bp, synthetic construct; identical to SEQ ID NO: 458
  source 1..120: mol_type = other DNA

SEQ ID NO: 463 - DNA, 120 bp, synthetic construct; identical to SEQ ID NO: 459
  source 1..120: mol_type = other DNA

SEQ ID NO: 464 - DNA, 120 bp, synthetic construct; identical to SEQ ID NO: 460
  source 1..120: mol_type = other DNA

SEQ ID NO: 465 - DNA, 120 bp, synthetic construct
  source 1..120: mol_type = other DNA
acattttaactacaataattttaatacatattcttcatttataacctataacacctaacaatccttcctaaataaacacctaaacactaaaaaaaccttctatcctctacaaacctctac

SEQ ID NO: 466 - DNA, 120 bp, synthetic construct
  source 1..120: mol_type = other DNA
atattttggttatagtgattttaatatatattttttatttatgatttatgatatttaatagttttttttggataaatgtttaggtattggaagggttttttgttttttgtaggtttttgt

SEQ ID NO: 467 - DNA, 120 bp, synthetic construct
  source 1..120: mol_type = other DNA
acattttaactacaataattttaatacatattcttcatttataacctataacacctaaaaatacttcctaaataaacacctaaacactaaaaaaaccttctatcctctacaaacctctac

SEQ ID NO: 468 - DNA, 120 bp, synthetic construct
  source 1..120: mol_type = other DNA
atattttggttatagtgattttaatatatattttttatttatgatttatgatatttaagagtattttttggataaatgtttaggtattggaagggttttttgttttttgtaggtttttgt

SEQ ID NO: 469 - DNA, 120 bp, synthetic construct
  source 1..120: mol_type = other DNA
acattttaactacaataattttaatacatattcttcatttataacctataacacctaacaatccttcctaaataaacgcctaaacactaaaaaaaccttctatcctctacaaacctctac

SEQ ID NO: 470 - DNA, 120 bp, synthetic construct
  source 1..120: mol_type = other DNA
atattttggttatagtgattttaatatatattttttatttatgatttatgatatttaatagttttttttggataaacgtttaggtattggaagggttttttgttttttgtaggtttttgt

SEQ ID NO: 471 - DNA, 120 bp, synthetic construct
  source 1..120: mol_type = other DNA
acattttaactacaataattttaatacatattcttcatttataacctataacacctaaaaatacttcctaaataaacgcctaaacactaaaaaaaccttctatcctctacaaacctctac

SEQ ID NO: 472 - DNA, 120 bp, synthetic construct
  source 1..120: mol_type = other DNA
atattttggttatagtgattttaatatatattttttatttatgatttatgatatttaagagtattttttggataaacgtttaggtattggaagggttttttgttttttgtaggtttttgt

SEQ ID NO: 473 - DNA, 120 bp, synthetic construct
  source 1..120: mol_type = other DNA
ttctaaccaaaaaattattaaaccaaaataatatatatcacatttaaacctaaaacttaattattaatacaaaaatctccaatattatcttcttacactatttacaactaaaaaaataac

SEQ ID NO: 474 - DNA, 120 bp, synthetic construct
  source 1..120: mol_type = other DNA
ttttgattaaggggttgttaagttgaagtgatgtgtgttatatttggatttaggatttaattgttagtgtaagaatttttagtgttgtttttttgtattgtttataattgaagagatggt

SEQ ID NO: 475 - DNA, 120 bp, synthetic construct
  source 1..120: mol_type = other DNA
ttctaaccaaaaaattattaaaccaaaataatatatatcacatttaaacctaaaactttatttttaatacaaaaatctccaatattatcttcttacactatttacaactaaaaaaataac

SEQ ID NO: 476 - DNA, 120 bp, synthetic construct
  source 1..120: mol_type = other DNA
ttttgattaaggggttgttaagttgaagtgatgtgtgttatatttggatttaggattttatttttagtgtaagaatttttagtgttgtttttttgtattgtttataattgaagagatggt

SEQ ID NO: 477 - DNA, 120 bp, synthetic construct
  source 1..120: mol_type = other DNA
ttctaaccaaaaaattattaaaccgaaataatatatatcacatttaaacctaaaacttaattattaatacaaaaatctccaatattatcttcttacactatttacaactaaaaaaataac

SEQ ID NO: 478 - DNA, 120 bp, synthetic construct
  source 1..120: mol_type = other DNA
ttttgattaaggggttgttaagtcgaagtgatgtgtgttatatttggatttaggatttaattgttagtgtaagaatttttagtgttgtttttttgtattgtttataattgaagagatggt

SEQ ID NO: 479 - DNA, 120 bp, synthetic construct
  source 1..120: mol_type = other DNA
ttctaaccaaaaaattattaaaccgaaataatatatatcacatttaaacctaaaactttatttttaatacaaaaatctccaatattatcttcttacactatttacaactaaaaaaataac

SEQ ID NO: 480 - DNA, 120 bp, synthetic construct
  source 1..120: mol_type = other DNA
ttttgattaaggggttgttaagtcgaagtgatgtgtgttatatttggatttaggattttatttttagtgtaagaatttttagtgttgtttttttgtattgtttataattgaagagatggt

SEQ ID NO: 481 - DNA, 120 bp, synthetic construct
  source 1..120: mol_type = other DNA
actatataacatccatatctcaaaacataattatttcaacaaaaaaatctttaaaaactcaaatccttaaatatttaaattacaaatatccaaaaaactcaaaatttaaaaaaaaaaatc

SEQ ID NO: 482 - DNA, 120 bp, synthetic construct
  source 1..120: mol_type = other DNA
attatatggtatttatattttagggtatggttgttttagtagaaaagtttttaaggatttaaatttttggatgtttgagttgtaaatgtttaagggatttagaatttagaagaaaaaatt

SEQ ID NO: 483 - DNA, 120 bp, synthetic construct
  source 1..120: mol_type = other DNA
actatataacatccatatctcaaaacataattatttcaacaaaaaaatctttaaaatctcaaatacttaaatatttaaattacaaatatccaaaaaactcaaaatttaaaaaaaaaaatc

SEQ ID NO: 484 - DNA, 120 bp, synthetic construct
  source 1..120: mol_type = other DNA
attatatggtatttatattttagggtatggttgttttagtagaaaagtttttaaggttttaaatgtttggatgtttgagttgtaaatgtttaagggatttagaatttagaagaaaaaatt

SEQ ID NO: 485 - DNA, 120 bp, synthetic construct; identical to SEQ ID NO: 481
  source 1..120: mol_type = other DNA

SEQ ID NO: 486 - DNA, 120 bp, synthetic construct; identical to SEQ ID NO: 482
  source 1..120: mol_type = other DNA

SEQ ID NO: 487 - DNA, 120 bp, synthetic construct; identical to SEQ ID NO: 483
  source 1..120: mol_type = other DNA

SEQ ID NO: 488 - DNA, 120 bp, synthetic construct; identical to SEQ ID NO: 484
  source 1..120: mol_type = other DNA

SEQ ID NO: 489 - DNA, 120 bp, synthetic construct
  source 1..120: mol_type = other DNA
atctattcaacatcacctcataaatattaactataaccacaacctaaattcaaaactcacattttaaacaactcaataaatacaaaccataatcaatataccaaaaacaataataaattt

SEQ ID NO: 490 - DNA, 120 bp, synthetic construct
  source 1..120: mol_type = other DNA
gtttgtttaatattattttataggtgttagttgtagttatagtttggatttaggatttatgttttaagtagtttgatggatgtagattatggttaatgtgttaaaagtagtagtgaattt

SEQ ID NO: 491 - DNA, 120 bp, synthetic construct
  source 1..120: mol_type = other DNA
atctattcaacatcacctcataaatattaactataaccacaacctaaattcaaaacacacatttaaaacaactcaataaatacaaaccataatcaatataccaaaaacaataataaattt

SEQ ID NO: 492 - DNA, 120 bp, synthetic construct
  source 1..120: mol_type = other DNA
gtttgtttaatattattttataggtgttagttgtagttatagtttggatttaggatgtatgtttaaagtagtttgatggatgtagattatggttaatgtgttaaaagtagtagtgaattt

SEQ ID NO: 493 - DNA, 120 bp, synthetic construct
  source 1..120: mol_type = other DNA
atctattcaacatcacctcataaatattaactataaccacaacctaaattcaaaactcacgttttaaacaactcgataaatacaaaccataatcaatataccaaaaacaataataaattt

SEQ ID NO: 494 - DNA, 120 bp, synthetic construct
  source 1..120: mol_type = other DNA
gtttgtttaatattattttataggtgttagttgtagttatagtttggatttaggatttacgttttaagtagttcgatggatgtagattatggttaatgtgttaaaagtagtagtgaattt

SEQ ID NO: 495 - DNA, 120 bp, synthetic construct
  source 1..120: mol_type = other DNA
atctattcaacatcacctcataaatattaactataaccacaacctaaattcaaaacgcacgtttaaaacaactcgataaatacaaaccataatcaatataccaaaaacaataataaattt

SEQ ID NO: 496 - DNA, 120 bp, synthetic construct
  source 1..120: mol_type = other DNA
gtttgtttaatattattttataggtgttagttgtagttatagtttggatttaggacgtacgtttaaagtagttcgatggatgtagattatggttaatgtgttaaaagtagtagtgaattt

SEQ ID NO: 497 - DNA, 120 bp, synthetic construct
  source 1..120: mol_type = other DNA
ataaatatacctaattctaaaaataaatacatttaaacaacttaaacataaaaaaccaattacccaacaactaaaaatctaaaatacccttatcaaactatataaataaaaaactaacaa

SEQ ID NO: 498 - DNA, 120 bp, synthetic construct
  source 1..120: mol_type = other DNA
gtaaatatatttaattttaaaggtgaatatatttaaatggtttaaatgtaaaaggttggttgtttagtaattggaaatttgaaatatttttgttaggttatgtaagtggagaattggtag

SEQ ID NO: 499 - DNA, 120 bp, synthetic construct
  source 1..120: mol_type = other DNA
ataaatatacctaattctaaaaataaatacatttaaacaacttaaacataaaaaacaaattaccaaacaactaaaaatctaaaatacccttatcaaactatataaataaaaaactaacaa

SEQ ID NO: 500 - DNA, 120 bp, synthetic construct
  source 1..120: mol_type = other DNA
gtaaatatatttaattttaaaggtgaatatatttaaatggtttaaatgtaaaaggtaggttgttaagtaattggaaatttgaaatatttttgttaggttatgtaagtggagaattggtag

SEQ ID NO: 501 - DNA, 120 bp, synthetic construct
  source 1..120: mol_type = other DNA
ataaatatacctaattctaaaaataaatacatttaaacgacttaaacgtaaaaaaccgattacccaacaactaaaaatctaaaatacccttatcaaactatataaataaaaaactaacaa

SEQ ID NO: 502 - DNA, 120 bp, synthetic construct
  source 1..120: mol_type = other DNA
gtaaatatatttaattttaaaggtgaatatatttaaacggtttaaacgtaaaaggtcggttgtttagtaattggaaatttgaaatatttttgttaggttatgtaagtggagaattggtag

SEQ ID NO: 503 - DNA, 120 bp, synthetic construct
  source 1..120: mol_type = other DNA
ataaatatacctaattctaaaaataaatacatttaaacgacttaaacgtaaaaaacaaattaccaaacaactaaaaatctaaaatacccttatcaaactatataaataaaaaactaacaa

SEQ ID NO: 504 - DNA, 120 bp, synthetic construct
  source 1..120: mol_type = other DNA
gtaaatatatttaattttaaaggtgaatatatttaaacggtttaaacgtaaaaggtaggttgttaagtaattggaaatttgaaatatttttgttaggttatgtaagtggagaattggtag

SEQ ID NO: 505 - DNA, 120 bp, synthetic construct
  source 1..120: mol_type = other DNA
cttataaaaaataaaaactcaaactaccttcaaattatccctctacaacttccactatccaaaaaaactaacttcatattaaccacctactaccttaaaaacacacatatatccataacc

SEQ ID NO: 506 - DNA, 120 bp, synthetic construct
  source 1..120: mol_type = other DNA
tttgtggagaatgggggtttaggttgtttttaggttgtttttttgtaatttttattgtttagggaaattagttttatattggttatttgttgttttgaaaatatatatgtgtttgtgatt

SEQ ID NO: 507 - DNA, 120 bp, synthetic construct
  source 1..120: mol_type = other DNA
cttataaaaaataaaaactcaaactaccttcaaattatccctctacaacttccactttccaaaacaactaacttcatattaaccacctactaccttaaaaacacacatatatccataacc

SEQ ID NO: 508 - DNA, 120 bp, synthetic construct
  source 1..120: mol_type = other DNA
tttgtggagaatgggggtttaggttgtttttaggttgtttttttgtaatttttattttttagggtaattagttttatattggttatttgttgttttgaaaatatatatgtgtttgtgatt

SEQ ID NO: 509 - DNA, 120 bp, synthetic construct
  source 1..120: mol_type = other DNA
cttataaaaaataaaaactcaaactaccttcaaattatccctctacaacttccactatccaaaaaaactaacttcatattaaccacctactaccttaaaaacacacatatatccgtaacc

SEQ ID NO: 510 - DNA, 120 bp, synthetic construct
  source 1..120: mol_type = other DNA
tttgtggagaatgggggtttaggttgtttttaggttgtttttttgtaatttttattgtttagggaaattagttttatattggttatttgttgttttgaaaatatatatgtgttcgtgatt

SEQ ID NO: 511 - DNA, 120 bp, synthetic construct
  source 1..120: mol_type = other DNA
cttataaaaaataaaaactcaaactaccttcaaattatccctctacaacttccactttccaaaacaactaacttcatattaaccacctactaccttaaaaacacacatatatccgtaacc

SEQ ID NO: 512 - DNA, 120 bp, synthetic construct
  source 1..120: mol_type = other DNA
tttgtggagaatgggggtttaggttgtttttaggttgtttttttgtaatttttattttttagggtaattagttttatattggttatttgttgttttgaaaatatatatgtgttcgtgatt

SEQ ID NO: 513 - DNA, 120 bp, synthetic construct
  source 1..120: mol_type = other DNA
taaaaataaaacttaatatcaataattaaaatttatccatataaaaacataaaaatcattttccctacccataaaaaaaaaaaaataactctaaataaccctaaataatcaacaacctaa

SEQ ID NO: 514 - DNA, 120 bp, synthetic construct
  source 1..120: mol_type = other DNA
tagaaataagatttgatgttagtgattgggatttatttatataaagatatgagggttattttttttatttataaaagagagggagtgattttgggtagttttgggtgattagtagtttag

SEQ ID NO: 515 - DNA, 120 bp, synthetic construct
  source 1..120: mol_type = other DNA
taaaaataaaacttaatatcaataattaaaatttatccatataaaaacataaaaataattttccatacccataaaaaaaaaaaaataactctaaataaccctaaataatcaacaacctaa

SEQ ID NO: 516 - DNA, 120 bp, synthetic construct
  source 1..120: mol_type = other DNA
tagaaataagatttgatgttagtgattgggatttatttatataaagatatgagggtaattttttatatttataaaagagagggagtgattttgggtagttttgggtgattagtagtttag

SEQ ID NO: 517 - DNA, 120 bp, synthetic construct; identical to SEQ ID NO: 513
  source 1..120: mol_type = other DNA

SEQ ID NO: 518 - DNA, 120 bp, synthetic construct; identical to SEQ ID NO: 514
  source 1..120: mol_type = other DNA

SEQ ID NO: 519 - DNA, 120 bp, synthetic construct; identical to SEQ ID NO: 515
  source 1..120: mol_type = other DNA

SEQ ID NO: 520 - DNA, 120 bp, synthetic construct; identical to SEQ ID NO: 516
  source 1..120: mol_type = other DNA

SEQ ID NO: 521 - DNA, 120 bp, synthetic construct
  source 1..120: mol_type = other DNA
taaaaaaaaaaaatactctctcttaaattaaccaaaaatcccattaaaaataaaaaaacttaaatacatccacaaaaacacaaacaaaattaaacacataaacaaaaacccaaaatcaac

SEQ ID NO: 522 - DNA, 120 bp, synthetic construct
  source 1..120: mol_type = other DNA
tggagaagaaaagtgtttttttttgagttgattgagagttttattagggatagggagatttaaatgtatttataggggtataggtagagttgagtatataaatggaggtttaaaattagt

SEQ ID NO: 523 - DNA, 120 bp, synthetic construct
  source 1..120: mol_type = other DNA
taaaaaaaaaaaatactctctcttaaattaaccaaaaatcccattaaaaataaaaaatcttaaaaacatccacaaaaacacaaacaaaattaaacacataaacaaaaacccaaaatcaac

SEQ ID NO: 524 - DNA, 120 bp, synthetic construct
  source 1..120: mol_type = other DNA
tggagaagaaaagtgtttttttttgagttgattgagagttttattagggatagggagttttaaaagtatttataggggtataggtagagttgagtatataaatggaggtttaaaattagt

SEQ ID NO: 525 - DNA, 120 bp, synthetic construct
  source 1..120: mol_type = other DNA
taaaaaaaaaaaatactctctcttaaattaaccgaaaatcccattaaaaataaaaaaacttaaatacatccacaaaaacacaaacaaaattaaacacataaacgaaaacccaaaatcaac

SEQ ID NO: 526 - DNA, 120 bp, synthetic construct
  source 1..120: mol_type = other DNA
tggagaagaaaagtgtttttttttgagttgatcgagagttttattagggatagggagatttaaatgtatttataggggtataggtagagttgagtatataaacggaggtttaaaattagt

SEQ ID NO: 527 - DNA, 120 bp, synthetic construct
  source 1..120: mol_type = other DNA
taaaaaaaaaaaatactctctcttaaattaaccgaaaatcccattaaaaataaaaaatcttaaaaacatccacaaaaacacaaacaaaattaaacacataaacgaaaacccaaaatcaac

SEQ ID NO: 528 - DNA, 120 bp, synthetic construct
  source 1..120: mol_type = other DNA
tggagaagaaaagtgtttttttttgagttgatcgagagttttattagggatagggagttttaaaagtatttataggggtataggtagagttgagtatataaacggaggtttaaaattagt

SEQ ID NO: 529 - DNA, 120 bp, synthetic construct
  source 1..120: mol_type = other DNA
tacaaaattaaacatctaactctttttaaaaccaatactaaaccccaaatttatatcatctaaacaaactttattcctatttttttaaataaaaaaaaattaatttatatttaaaaaaca

SEQ ID NO: 530 - DNA, 120 bp, synthetic construct
  source 1..120: mol_type = other DNA
tgtaaagttaaatatttagttttttttgaaattaatgttgaattttagatttgtattatttaaatggattttgtttttatttttttaagtagaaagaaattagtttatatttaagaaata

SEQ ID NO: 531 - DNA, 120 bp, synthetic construct
  source 1..120: mol_type = other DNA
tacaaaattaaacatctaactctttttaaaaccaatactaaaccccaaatttatataatctaaaaaaactttattcctatttttttaaataaaaaaaaattaatttatatttaaaaaaca

SEQ ID NO: 532 - DNA, 120 bp, synthetic construct
  source 1..120: mol_type = other DNA
tgtaaagttaaatatttagttttttttgaaattaatgttgaattttagatttgtatgatttaaagggattttgtttttatttttttaagtagaaagaaattagtttatatttaagaaata

SEQ ID NO: 533 - DNA, 120 bp, synthetic construct
  source 1..120: mol_type = other DNA
tacaaaattaaacatctaactctttttaaaaccaatactaaaccccaaatttatatcatctaaacgaactttattcctatttttttaaataaaaaaaaattaatttatatttaaaaaaca

SEQ ID NO: 534 - DNA, 120 bp, synthetic construct
  source 1..120: mol_type = other DNA
tgtaaagttaaatatttagttttttttgaaattaatgttgaattttagatttgtattatttaaacggattttgtttttatttttttaagtagaaagaaattagtttatatttaagaaata

SEQ ID NO: 535 - DNA, 120 bp, synthetic construct; identical to SEQ ID NO: 531
  source 1..120: mol_type = other DNA

SEQ ID NO: 536 - DNA, 120 bp, synthetic construct; identical to SEQ ID NO: 532
  source 1..120: mol_type = other DNA

SEQ ID NO: 537 - DNA, 120 bp, synthetic construct
  source 1..120: mol_type = other DNA
aatttctccatctctaacataaaaataactctatctccccaaccaacatcaaatcactatattaaaaatttccaacacaaaaatttaaaaaacaaaaaacactatacaaaatcattccca

SEQ ID NO: 538 - DNA, 120 bp, synthetic construct
  source 1..120: mol_type = other DNA
agtttttttatttttaatatggaggtggttttatttttttagttaatattaagttattgtgttaggaatttttagtgtaaggatttagaaagtaggaagtattgtgtaaagttattttta

SEQ ID NO: 539 - DNA, 120 bp, synthetic construct
  source 1..120: mol_type = other DNA
aatttctccatctctaacataaaaataactctatctccccaaccaacatcaaatcactttattcaaaatttccaacacaaaaatttaaaaaacaaaaaacactatacaaaatcattccca

SEQ ID NO: 540 - DNA, 120 bp, synthetic construct
  source 1..120: mol_type = other DNA
agtttttttatttttaatatggaggtggttttatttttttagttaatattaagttattttgtttggaatttttagtgtaaggatttagaaagtaggaagtattgtgtaaagttattttta

SEQ ID NO: 541 - DNA, 120 bp, synthetic construct
  source 1..120: mol_type = other DNA
aatttctccatctctaacataaaaataactctatctccccaaccaacatcaaatcactatattaaaaatttccaacgcaaaaatttaaaaaacaaaaaacactatacaaaatcattccca

SEQ ID NO: 542 - DNA, 120 bp, synthetic construct
  source 1..120: mol_type = other DNA
agtttttttatttttaatatggaggtggttttatttttttagttaatattaagttattgtgttaggaatttttagcgtaaggatttagaaagtaggaagtattgtgtaaagttattttta

SEQ ID NO: 543 - DNA, 120 bp, synthetic construct
  source 1..120: mol_type = other DNA
aatttctccatctctaacataaaaataactctatctccccaaccaacatcaaatcactttattcgaaatttccaacgcaaaaatttaaaaaacaaaaaacactatacaaaatcattccca

SEQ ID NO: 544 - DNA, 120 bp, synthetic construct
  source 1..120: mol_type = other DNA
agtttttttatttttaatatggaggtggttttatttttttagttaatattaagttattttgttcggaatttttagcgtaaggatttagaaagtaggaagtattgtgtaaagttattttta

SEQ ID NO: 545 - DNA, 120 bp, synthetic construct
  source 1..120: mol_type = other DNA
atataatatactcaaaccataaccaaaaaataattaaaaaaaaatttcaataaaccattattaaaaatcctaattaattttttatattactaaataacataaataaaaatataaaataaa

SEQ ID NO: 546 - DNA, 120 bp, synthetic construct
  source 1..120: mol_type = other DNA
atatagtatatttaaattatagttaaagaatggttaaaagaaaattttaataaattattattggaagttttagttaattttttatgttattgagtaatataaataagagtataaaatgag

SEQ ID NO: 547 - DNA, 120 bp, synthetic construct
  source 1..120: mol_type = other DNA
atataatatactcaaaccataaccaaaaaataattaaaaaaaaatttcaataaaccattctttaaaatcctaattaattttttatattactaaataacataaataaaaatataaaataaa

SEQ ID NO: 548 - DNA, 120 bp, synthetic construct
  source 1..120: mol_type = other DNA
atatagtatatttaaattatagttaaagaatggttaaaagaaaattttaataaattattttttgaagttttagttaattttttatgttattgagtaatataaataagagtataaaatgag

SEQ ID NO: 549 - DNA, 120 bp, synthetic construct; identical to SEQ ID NO: 545
  source 1..120: mol_type = other DNA

SEQ ID NO: 550 - DNA, 120 bp, synthetic construct; identical to SEQ ID NO: 546
  source 1..120: mol_type = other DNA

SEQ ID NO: 551 - DNA, 120 bp, synthetic construct; identical to SEQ ID NO: 547
  source 1..120: mol_type = other DNA

SEQ ID NO: 552 - DNA, 120 bp, synthetic construct; identical to SEQ ID NO: 548
  source 1..120: mol_type = other DNA

SEQ ID NO: 553 - DNA, 120 bp, synthetic construct
  source 1..120: mol_type = other DNA
actacttaacaattctttaatttaaaataaaaaaaaacatatttacttctaactaatacttatccaaaaacatatttttaaaaaactttaaattattaaaatatcaaaaacaccctctaa

SEQ ID NO: 554 - DNA, 120 bp, synthetic construct
  source 1..120: mol_type = other DNA
gttgtttgataattttttggtttgggataaaggaggatatatttatttttagttgatatttatttaaaggtatatttttgggaggttttagattattagggtgttaaagatattttttaa

SEQ ID NO: 555 - DNA, 120 bp, synthetic construct
  source 1..120: mol_type = other DNA
actacttaacaattctttaatttaaaataaaaaaaaacatatttacttctaactaattcttatacaaaaacatatttttaaaaaactttaaattattaaaatatcaaaaacaccctctaa

SEQ ID NO: 556 - DNA, 120 bp, synthetic construct
  source 1..120: mol_type = other DNA
gttgtttgataattttttggtttgggataaaggaggatatatttatttttagttgatttttatataaaggtatatttttgggaggttttagattattagggtgttaaagatattttttaa

SEQ ID NO: 557 - DNA, 120 bp, synthetic construct; identical to SEQ ID NO: 553
  source 1..120: mol_type = other DNA

SEQ ID NO: 558 - DNA, 120 bp, synthetic construct; identical to SEQ ID NO: 554
  source 1..120: mol_type = other DNA

SEQ ID NO: 559 - DNA, 120 bp, synthetic construct; identical to SEQ ID NO: 555
  source 1..120: mol_type = other DNA

SEQ ID NO: 560 - DNA, 120 bp, synthetic construct; identical to SEQ ID NO: 556
  source 1..120: mol_type = other DNA

SEQ ID NO: 561 - DNA, 120 bp, synthetic construct
  source 1..120: mol_type = other DNA
attaattatccaatctaaatttataaatattaataaaattttcccttactctaatatacatattccaatccaatctaattttccttataaatatctacttaattaattaccttctttcat

SEQ ID NO: 562 - DNA, 120 bp, synthetic construct
  source 1..120: mol_type = other DNA
gttagttatttagtttaggtttatggatgttaatagagtttttttttattttggtatgtatattttaatttagtttagttttttttgtaaatatttgtttagttgattgtttttttttat

SEQ ID NO: 563 - DNA, 120 bp, synthetic construct
  source 1..120: mol_type = other DNA
attaattatccaatctaaatttataaatattaataaaattttcccttactctaatatccatataccaatccaatctaattttccttataaatatctacttaattaattaccttctttcat

SEQ ID NO: 564 - DNA, 120 bp, synthetic construct
  source 1..120: mol_type = other DNA
gttagttatttagtttaggtttatggatgttaatagagtttttttttattttggtatttatatattaatttagtttagttttttttgtaaatatttgtttagttgattgtttttttttat

SEQ ID NO: 565 - DNA, 120 bp, synthetic construct; identical to SEQ ID NO: 561
  source 1..120: mol_type = other DNA

SEQ ID NO: 566 - DNA, 120 bp, synthetic construct; identical to SEQ ID NO: 562
  source 1..120: mol_type = other DNA

SEQ ID NO: 567 - DNA, 120 bp, synthetic construct; identical to SEQ ID NO: 563
  source 1..120: mol_type = other DNA

SEQ ID NO: 568 - DNA, 120 bp, synthetic construct; identical to SEQ ID NO: 564
  source 1..120: mol_type = other DNA

SEQ ID NO: 569 - DNA, 120 bp, synthetic construct
  source 1..120: mol_type = other DNA
aaaaacttttatattttttaaacaaaaacataacaccatcactattttatatcaaaacacctattattcatatcatatataaatacaatattttaatatttataaaatttttttcaaata

SEQ ID NO: 570 - DNA, 120 bp, synthetic construct
  source 1..120: mol_type = other DNA
gaaggtttttatgttttttgaataaggatataatattgttattgttttatgttaggatgtttattatttatattatatatagatataatattttagtgtttataaagttttttttaaata

SEQ ID NO: 571 - DNA, 120 bp, synthetic construct
  source 1..120: mol_type = other DNA
aaaaacttttatattttttaaacaaaaacataacaccatcactattttatatcaaaactcctaatattcatatcatatataaatacaatattttaatatttataaaatttttttcaaata

SEQ ID NO: 572 - DNA, 120 bp, synthetic construct
  source 1..120: mol_type = other DNA
gaaggtttttatgttttttgaataaggatataatattgttattgttttatgttaggatttttaatatttatattatatatagatataatattttagtgtttataaagttttttttaaata

SEQ ID NO: 573 - DNA, 120 bp, synthetic construct
  source 1..120: mol_type = other DNA
aaaaacttttatattttttaaacaaaaacataacaccgtcactattttatatcaaaacgcctattattcatatcatatataaatacaatattttaatatttataaaatttttttcaaata

SEQ ID NO: 574 - DNA, 120 bp, synthetic construct
  source 1..120: mol_type = other DNA
gaaggtttttatgttttttgaataaggatataatatcgttattgttttatgttaggacgtttattatttatattatatatagatataatattttagtgtttataaagttttttttaaata

SEQ ID NO: 575 - DNA, 120 bp, synthetic construct
  source 1..120: mol_type = other DNA
aaaaacttttatattttttaaacaaaaacataacaccgtcactattttatatcaaaactcctaatattcatatcatatataaatacaatattttaatatttataaaatttttttcaaata

SEQ ID NO: 576 - DNA, 120 bp, synthetic construct
  source 1..120: mol_type = other DNA
gaaggtttttatgttttttgaataaggatataatatcgttattgttttatgttaggatttttaatatttatattatatatagatataatattttagtgtttataaagttttttttaaata

SEQ ID NO: 577 - DNA, 120 bp, synthetic construct
  source 1..120: mol_type = other DNA
cttttactaaaattacaaaaaatataccccactatttaaaaatataatcaacaaatccatatttaactcaaatctcataatttctaactctatctcccttaaacctctatatttcaacct

SEQ ID NO: 578 - DNA, 120 bp, synthetic construct
  source 1..120: mol_type = other DNA
tttttgttaaggttgtaaagggtatgttttattatttaagaatgtggttaataagtttatgtttagtttagattttatggtttttaattttgttttttttgggtttttgtattttagttt

SEQ ID NO: 579 - DNA, 120 bp, synthetic construct
  source 1..120: mol_type = other DNA
cttttactaaaattacaaaaaatataccccactatttaaaaatataatcaacaaatccctatataactcaaatctcataatttctaactctatctcccttaaacctctatatttcaacct

SEQ ID NO: 580 - DNA, 120 bp, synthetic construct
  source 1..120: mol_type = other DNA
tttttgttaaggttgtaaagggtatgttttattatttaagaatgtggttaataagtttttgtgtagtttagattttatggtttttaattttgttttttttgggtttttgtattttagttt

SEQ ID NO: 581 - DNA, 120 bp, synthetic construct; identical to SEQ ID NO: 577
  source 1..120: mol_type = other DNA

SEQ ID NO: 582 - DNA, 120 bp, synthetic construct; identical to SEQ ID NO: 578
  source 1..120: mol_type = other DNA

SEQ ID NO: 583 - DNA, 120 bp, synthetic construct; identical to SEQ ID NO: 579
  source 1..120: mol_type = other DNA

SEQ ID NO: 584 - DNA, 120 bp, synthetic construct; identical to SEQ ID NO: 580
  source 1..120: mol_type = other DNA

SEQ ID NO: 585 - DNA, 120 bp, synthetic construct
  source 1..120: mol_type = other DNA
accaaaaaataaaaaaatactcaaaaattacaaaaaactttcaaaaaaactcataaaccaaattaaaaaaattccaccaacaaatctaaacaatataaacaccaaaataaattttaaaat

SEQ ID NO: 586 - DNA, 120 bp, synthetic construct
  source 1..120: mol_type = other DNA
gttaaaaagtaagagagtgtttaaaaattatagagggtttttagaagggtttataagttagattgaaggagttttattagtaaatttggatagtataagtattgaagtaaattttaaagt

SEQ ID NO: 587 - DNA, 120 bp, synthetic construct
  source 1..120: mol_type = other DNA
accaaaaaataaaaaaatactcaaaaattacaaaaaactttcaaaaaaactcataaacaaaaataaaaaaattccaccaacaaatctaaacaatataaacaccaaaataaattttaaaat

SEQ ID NO: 588 - DNA, 120 bp, synthetic construct
  source 1..120: mol_type = other DNA
gttaaaaagtaagagagtgtttaaaaattatagagggtttttagaagggtttataagtgagagtgaaggagttttattagtaaatttggatagtataagtattgaagtaaattttaaagt

SEQ ID NO: 589 - DNA, 120 bp, synthetic construct
  source 1..120: mol_type = other DNA
accaaaaaataaaaaaatactcaaaaattacaaaaaactttcaaaaaaactcataaaccaaattaaaaaaattccaccaacaaatctaaacaatataaacaccgaaataaattttaaaat

SEQ ID NO: 590 - DNA, 120 bp, synthetic construct
  source 1..120: mol_type = other DNA
gttaaaaagtaagagagtgtttaaaaattatagagggtttttagaagggtttataagttagattgaaggagttttattagtaaatttggatagtataagtatcgaagtaaattttaaagt

SEQ ID NO: 591 - DNA, 120 bp, synthetic construct
  source 1..120: mol_type = other DNA
accaaaaaataaaaaaatactcaaaaattacaaaaaactttcaaaaaaactcataaacgaaaataaaaaaattccaccaacaaatctaaacaatataaacaccgaaataaattttaaaat

SEQ ID NO: 592 - DNA, 120 bp, synthetic construct
  source 1..120: mol_type = other DNA
gttaaaaagtaagagagtgtttaaaaattatagagggtttttagaagggtttataagcgagagtgaaggagttttattagtaaatttggatagtataagtatcgaagtaaattttaaagt

SEQ ID NO: 593 - DNA, 120 bp, synthetic construct
  source 1..120: mol_type = other DNA
aattaaaatcctattaatatcctaaacataaataaatctatcttcccaccctaaaaaccaaaaacatatcaaaaacaaacacaactaatatctaatactaaaaactctcctaaatacctt

SEQ ID NO: 594 - DNA, 120 bp, synthetic construct
  source 1..120: mol_type = other DNA
agttaaaattttattggtattttgaatataagtgggtttgtttttttattttaagaattaagggtatgttaggagtagatataattgatatttagtgttaaaagtttttttaagtatttt

SEQ ID NO: 595 - DNA, 120 bp, synthetic construct
  source 1..120: mol_type = other DNA
aattaaaatcctattaatatcctaaacataaataaatctatcttcccaccctaaaaaacaaaaccatatcaaaaacaaacacaactaatatctaatactaaaaactctcctaaatacctt

SEQ ID NO: 596 - DNA, 120 bp, synthetic construct
  source 1..120: mol_type = other DNA
agttaaaattttattggtattttgaatataagtgggtttgtttttttattttaagaaataaggttatgttaggagtagatataattgatatttagtgttaaaagtttttttaagtatttt

SEQ ID NO: 597 - DNA, 120 bp, synthetic construct; identical to SEQ ID NO: 593
  source 1..120: mol_type = other DNA

SEQ ID NO: 598 - DNA, 120 bp, synthetic construct; identical to SEQ ID NO: 594
  source 1..120: mol_type = other DNA

SEQ ID NO: 599 - DNA, 120 bp, synthetic construct; identical to SEQ ID NO: 595
  source 1..120: mol_type = other DNA

SEQ ID NO: 600 - DNA, 120 bp, synthetic construct; identical to SEQ ID NO: 596
  source 1..120: mol_type = other DNA

SEQ ID NO: 601 - DNA, 120 bp, synthetic construct
  source 1..120: mol_type = other DNA
aacaaaaatttttaaaaaaacaactaaatctaaatcttacataaaatttacaaaaaaaacctacatcaacttataatacttaaaacttaaaaaataatttttttttaaaaaatacatcaa

SEQ ID NO: 602 - DNA, 120 bp, synthetic construct
  source 1..120: mol_type = other DNA
aatagggatttttggagaaatgattgaatttaggttttgtatgaaatttataagaaaagtttgtattagtttgtagtgtttgaaatttgggaggtgatttttttttaaggagtatattaa

SEQ ID NO: 603 - DNA, 120 bp, synthetic construct
  source 1..120: mol_type = other DNA
aacaaaaatttttaaaaaaacaactaaatctaaatcttacataaaatttacaaaataaacctacaacaacttataatacttaaaacttaaaaaataatttttttttaaaaaatacatcaa

SEQ ID NO: 604 - DNA, 120 bp, synthetic construct
  source 1..120: mol_type = other DNA
aatagggatttttggagaaatgattgaatttaggttttgtatgaaatttataagataagtttgtaatagtttgtagtgtttgaaatttgggaggtgatttttttttaaggagtatattaa

SEQ ID NO: 605 - DNA, 120 bp, synthetic construct
  source 1..120: mol_type = other DNA
aacaaaaatttttaaaaaaacgactaaatctaaatcttacataaaatttacaaaaaaaacctacatcaacttataatacttaaaacttaaaaaataatttttttttaaaaaatacatcaa

SEQ ID NO: 606 - DNA, 120 bp, synthetic construct
  source 1..120: mol_type = other DNA
aatagggatttttggagaaacgattgaatttaggttttgtatgaaatttataagaaaagtttgtattagtttgtagtgtttgaaatttgggaggtgatttttttttaaggagtatattaa

SEQ ID NO: 607 - DNA, 120 bp, synthetic construct
  source 1..120: mol_type = other DNA
aacaaaaatttttaaaaaaacgactaaatctaaatcttacataaaatttacaaaataaacctacaacaacttataatacttaaaacttaaaaaataatttttttttaaaaaatacatcaa

SEQ ID NO: 608 - DNA, 120 bp, synthetic construct
  source 1..120: mol_type = other DNA
aatagggatttttggagaaacgattgaatttaggttttgtatgaaatttataagataagtttgtaatagtttgtagtgtttgaaatttgggaggtgatttttttttaaggagtatattaa

SEQ ID NO: 609 - DNA, 120 bp, synthetic construct
  source 1..120: mol_type = other DNA
aaaaaaacaaacatatttatcctcatttcatccataaaaaaataaaaactcaaaaaaatcctatactacatctaaaatcaatataattttctacctctaaaaccccctacccctaaaacc

SEQ ID NO: 610 - DNA, 120 bp, synthetic construct
  source 1..120: mol_type = other DNA
gagaggataggtatgtttatttttattttatttatgaggaagtggaagtttaaagaggttttatgttgtatttggggttagtgtggttttttgtttttgggattttttatttttgaggtt

SEQ ID NO: 611 - DNA, 120 bp, synthetic construct
  source 1..120: mol_type = other DNA
aaaaaaacaaacatatttatcctcatttcatccataaaaaaataaaaactcaaaaaaatcaaatactacatctaaaatcaatataattttctacctctaaaaccccctacccctaaaacc

SEQ ID NO: 612 - DNA, 120 bp, synthetic construct
  source 1..120: mol_type = other DNA
gagaggataggtatgtttatttttattttatttatgaggaagtggaagtttaaagaggttagatgttgtatttggggttagtgtggttttttgtttttgggattttttatttttgaggtt

SEQ ID NO: 613 - DNA, 120 bp, synthetic construct; identical to SEQ ID NO: 609
  source 1..120: mol_type = other DNA

SEQ ID NO: 614 - DNA, 120 bp, synthetic construct; identical to SEQ ID NO: 610
  source 1..120: mol_type = other DNA

SEQ ID NO: 615 - DNA, 120 bp, synthetic construct; identical to SEQ ID NO: 611
  source 1..120: mol_type = other DNA

SEQ ID NO: 616 - DNA, 120 bp, synthetic construct; identical to SEQ ID NO: 612
  source 1..120: mol_type = other DNA

SEQ ID NO: 617 - DNA, 120 bp, synthetic construct
  source 1..120: mol_type = other DNA
aacttccctaatctattatcctaccaacctctcataacaaaatccaacttcctaaataaattcaaacaactcaatcacctaactcaaaactccatacttcaaaaaacaaataactaatac

SEQ ID NO: 618 - DNA, 120 bp, synthetic construct
  source 1..120: mol_type = other DNA
aatttttttgatttgttattttgttagttttttatgataaagtttagttttttgagtaaatttgaataatttagttatttaatttagaattttatattttagggagtaaatggttgatgt

SEQ ID NO: 619 - DNA, 120 bp, synthetic construct
  source 1..120: mol_type = other DNA
aacttccctaatctattatcctaccaacctctcataacaaaatccaacttcctaaataaaaacaaacaactcaatcacctaactcaaaactccatacttcaaaaaacaaataactaatac

SEQ ID NO: 620 - DNA, 120 bp, synthetic construct
  source 1..120: mol_type = other DNA
aatttttttgatttgttattttgttagttttttatgataaagtttagttttttgagtaaaggtgaataatttagttatttaatttagaattttatattttagggagtaaatggttgatgt

SEQ ID NO: 621 - DNA, 120 bp, synthetic construct
  source 1..120: mol_type = other DNA
aacttccctaatctattatcctaccaacctctcataacaaaatccaacttcctaaataaattcgaacaactcaatcacctaactcaaaactccatacttcaaaaaacaaataactaatac

SEQ ID NO: 622 - DNA, 120 bp, synthetic construct
  source 1..120: mol_type = other DNA
aatttttttgatttgttattttgttagttttttatgataaagtttagttttttgagtaaattcgaataatttagttatttaatttagaattttatattttagggagtaaatggttgatgt

SEQ ID NO: 623 - DNA, 120 bp, synthetic construct
  source 1..120: mol_type = other DNA
aacttccctaatctattatcctaccaacctctcataacaaaatccaacttcctaaataaaaacgaacaactcaatcacctaactcaaaactccatacttcaaaaaacaaataactaatac

SEQ ID NO: 624 - DNA, 120 bp, synthetic construct
  source 1..120: mol_type = other DNA
aatttttttgatttgttattttgttagttttttatgataaagtttagttttttgagtaaaggcgaataatttagttatttaatttagaattttatattttagggagtaaatggttgatgt

SEQ ID NO: 625 - DNA, 120 bp, synthetic construct
  source 1..120: mol_type = other DNA
ctaaaaacaaccaataacatcatacactaaaaaaaaaaaaaaaccaatcacaattcttatttacataacaaccacatcaaactttctacctcaatacccattcattcaattttctctcca

SEQ ID NO: 626 - DNA, 120 bp, synthetic construct
  source 1..120: mol_type = other DNA
ttgagagtagttagtgatattgtgtgttgaaagaaagagaaagttaattatggtttttatttgtatgatagttatattaggttttttgttttagtgtttatttatttagtttttttttta

SEQ ID NO: 627 - DNA, 120 bp, synthetic construct
  source 1..120: mol_type = other DNA
ctaaaaacaaccaataacatcatacactaaaaaaaaaaaaaaaccaatcacaattcttataaacataacaaccacatcaaactttctacctcaatacccattcattcaattttctctcca

SEQ ID NO: 628 - DNA, 120 bp, synthetic construct
  source 1..120: mol_type = other DNA
ttgagagtagttagtgatattgtgtgttgaaagaaagagaaagttaattatggtttttataagtatgatagttatattaggttttttgttttagtgtttatttatttagtttttttttta

SEQ ID NO: 629 - DNA, 120 bp, synthetic construct
  source 1..120: mol_type = other DNA
ctaaaaacaaccaataacatcgtacgctaaaaaaaaaaaaaaaccaatcacgattcttatttacataacaaccacatcaaactttctacctcaatacccattcattcaattttctctcca

SEQ ID NO: 630 - DNA, 120 bp, synthetic construct
  source 1..120: mol_type = other DNA
ttgagagtagttagtgatatcgtgcgttgaaagaaagagaaagttaattacggtttttatttgtatgatagttatattaggttttttgttttagtgtttatttatttagtttttttttta

SEQ ID NO: 631 - DNA, 120 bp, synthetic construct
  source 1..120: mol_type = other DNA
ctaaaaacaaccaataacatcgtacgctaaaaaaaaaaaaaaaccaatcacgattcttataaacataacaaccacatcaaactttctacctcaatacccattcattcaattttctctcca

SEQ ID NO: 632 - DNA, 120 bp, synthetic construct
  source 1..120: mol_type = other DNA
ttgagagtagttagtgatatcgtgcgttgaaagaaagagaaagttaattacggtttttataagtatgatagttatattaggttttttgttttagtgtttatttatttagtttttttttta

SEQ ID NO: 633 - DNA, 120 bp, synthetic construct
  source 1..120: mol_type = other DNA
acaaaaaaacacctttactaactccatcacatactactaataataaaaaacaaaaatcctaaaatacctttctttaaacctcatccctcttcataacttcccaaaaaaaactatcaataa

SEQ ID NO: 634 - DNA, 120 bp, synthetic construct
  source 1..120: mol_type = other DNA
atagaggaatatttttgttgattttattatatgttgttgatggtgaagggtgaaggttttggaatgtttttttttgagttttatttttttttatgattttttagagagaattgttagtga

SEQ ID NO: 635 - DNA, 120 bp, synthetic construct
  source 1..120: mol_type = other DNA
acaaaaaaacacctttactaactccatcacatactactaataataaaaaacaaaaatcctctaatacctttctttaaacctcatccctcttcataacttcccaaaaaaaactatcaataa

SEQ ID NO: 636 - DNA, 120 bp, synthetic construct
  source 1..120: mol_type = other DNA
atagaggaatatttttgttgattttattatatgttgttgatggtgaagggtgaaggttttttaatgtttttttttgagttttatttttttttatgattttttagagagaattgttagtga

SEQ ID NO: 637 - DNA, 120 bp, synthetic construct
  source 1..120: mol_type = other DNA
acaaaaaaacacctttactaactccatcacatactactaataataaaaaacgaaaatcctaaaatacctttctttaaacctcatccctcttcataacttcccaaaaaaaactatcaataa

SEQ ID NO: 638 - DNA, 120 bp, synthetic construct
  source 1..120: mol_type = other DNA
atagaggaatatttttgttgattttattatatgttgttgatggtgaagggcgaaggttttggaatgtttttttttgagttttatttttttttatgattttttagagagaattgttagtga

SEQ ID NO: 639 - DNA, 120 bp, synthetic construct
  source 1..120: mol_type = other DNA
acaaaaaaacacctttactaactccatcacatactactaataataaaaaacgaaaatcctctaatacctttctttaaacctcatccctcttcataacttcccaaaaaaaactatcaataa

SEQ ID NO: 640 - DNA, 120 bp, synthetic construct
  source 1..120: mol_type = other DNA
atagaggaatatttttgttgattttattatatgttgttgatggtgaagggcgaaggttttttaatgtttttttttgagttttatttttttttatgattttttagagagaattgttagtga

SEQ ID NO: 641 - DNA, 120 bp, synthetic construct
  source 1..120: mol_type = other DNA
tataaacctatattttattttattaaaaacattaaccaaactaccaaaaaatccataacataaaaaaacttaaaaacctctcattcaatcacattcaccttctacttaaattttaataaa

SEQ ID NO: 642 - DNA, 120 bp, synthetic construct
  source 1..120: mol_type = other DNA
tataagtttgtgttttgttttattagaaatgttagttagattattaaagggtttatggtatgaaaaagtttaaggattttttatttagttatatttattttttgtttgaattttggtgaa

SEQ ID NO: 643 - DNA, 120 bp, synthetic construct
  source 1..120: mol_type = other DNA
tataaacctatattttattttattaaaaacattaaccaaactaccaaaaaatccataacaataaaaaacttaaaaacctctcattcaatcacattcaccttctacttaaattttaataaa

SEQ ID NO: 644 - DNA, 120 bp, synthetic construct
  source 1..120: mol_type = other DNA
tataagtttgtgttttgttttattagaaatgttagttagattattaaagggtttatggtagtaaaaagtttaaggattttttatttagttatatttattttttgtttgaattttggtgaa

SEQ ID NO: 645 - DNA, 120 bp, synthetic construct
  source 1..120: mol_type = other DNA
tataaacctatattttattttattaaaaacgttaaccaaactaccaaaaaatccataacataaaaaaacttaaaaacctctcattcaatcacattcaccttctacttaaattttaataaa

SEQ ID NO: 646 - DNA, 120 bp, synthetic construct
  source 1..120: mol_type = other DNA
tataagtttgtgttttgttttattagaaacgttagttagattattaaagggtttatggtatgaaaaagtttaaggattttttatttagttatatttattttttgtttgaattttggtgaa

SEQ ID NO: 647 - DNA, 120 bp, synthetic construct
  source 1..120: mol_type = other DNA
tataaacctatattttattttattaaaaacgttaaccaaactaccaaaaaatccataacaataaaaaacttaaaaacctctcattcaatcacattcaccttctacttaaattttaataaa

SEQ ID NO: 648 - DNA, 120 bp, synthetic construct
  source 1..120: mol_type = other DNA
tataagtttgtgttttgttttattagaaacgttagttagattattaaagggtttatggtagtaaaaagtttaaggattttttatttagttatatttattttttgtttgaattttggtgaa

SEQ ID NO: 649 - DNA, 120 bp, synthetic construct
  source 1..120: mol_type = other DNA
cccaaaaaaacaactacaaaaacaacaatacactcccaacacaaaaatactcaaacactaaatccaaacataaaacaacaaaaacaccacctacaatacccacaaaccaaacaaaaataa

SEQ ID NO: 650 - DNA, 120 bp, synthetic construct
  source 1..120: mol_type = other DNA
tttaggagggtggttgtgagggtagtggtgtgtttttggtatgggggtgtttgagtattgagtttgggtatggagtagtgaaggtgttgtttgtagtgtttatggattaaatgggggtga

SEQ ID NO: 651 - DNA, 120 bp, synthetic construct
  source 1..120: mol_type = other DNA
cccaaaaaaacaactacaaaaacaacaatacactcccaacacaaaaatactcaaacactatttccaaacataaaacaacaaaaacaccacctacaatacccacaaaccaaacaaaaataa

SEQ ID NO: 652 - DNA, 120 bp, synthetic construct
  source 1..120: mol_type = other DNA
tttaggagggtggttgtgagggtagtggtgtgtttttggtatgggggtgtttgagtattgtttttgggtatggagtagtgaaggtgttgtttgtagtgtttatggattaaatgggggtga

SEQ ID NO: 653 - DNA, 120 bp, synthetic construct
  source 1..120: mol_type = other DNA
cccaaaaaaacgactacgaaaacaacgatacgctcccgacacgaaaatactcgaacactaaatccgaacataaaacaacgaaaacgccgcctacaatacccacgaaccaaacgaaaataa

SEQ ID NO: 654 - DNA, 120 bp, synthetic construct
  source 1..120: mol_type = other DNA
tttaggagggcggttgcgagggtagcggtgcgttttcggtacgggggtgttcgagtattgagttcgggtatggagtagcgaaggcgtcgtttgtagtgtttacggattaaacgggggtga

SEQ ID NO: 655 - DNA, 120 bp, synthetic construct
  source 1..120: mol_type = other DNA
cccaaaaaaacgactacgaaaacaacgatacgctcccgacacgaaaatactcgaacactatttccgaacataaaacaacgaaaacgccgcctacaatacccacgaaccaaacgaaaataa

SEQ ID NO: 656 - DNA, 120 bp, synthetic construct
  source 1..120: mol_type = other DNA
tttaggagggcggttgcgagggtagcggtgcgttttcggtacgggggtgttcgagtattgttttcgggtatggagtagcgaaggcgtcgtttgtagtgtttacggattaaacgggggtga

SEQ ID NO: 657 - DNA, 120 bp, synthetic construct
  source 1..120: mol_type = other DNA
taatttaataaaaaaaaaactcaattaaatattaaaactaatactcacaacctaaataatttacaaaacataactaactaataaatactaaaactaaaatccaatcctaaacaaattcaa

SEQ ID NO: 658 - DNA, 120 bp, synthetic construct
  source 1..120: mol_type = other DNA
tggtttaatgagggagaggtttagttgagtgttggaattaatatttatagtttaagtaatttgtgaaatataattagttagtaagtgttggagttgggatttgattttgggtagatttag

SEQ ID NO: 659 - DNA, 120 bp, synthetic construct
  source 1..120: mol_type = other DNA
taatttaataaaaaaaaaactcaattaaatattaaaactaatactcacaacctaaatcatttaccaaacataactaactaataaatactaaaactaaaatccaatcctaaacaaattcaa

SEQ ID NO: 660 - DNA, 120 bp, synthetic construct
  source 1..120: mol_type = other DNA
tggtttaatgagggagaggtttagttgagtgttggaattaatatttatagtttaagttatttgttaaatataattagttagtaagtgttggagttgggatttgattttgggtagatttag

SEQ ID NO: 661 - DNA, 120 bp, synthetic construct
  source 1..120: mol_type = other DNA
taatttaataaaaaaaaaactcaattaaatattaaaactaatactcacaacctaaataatttacgaaacataactaactaataaatactaaaactaaaatccgatcctaaacaaattcaa

SEQ ID NO: 662 - DNA, 120 bp, synthetic construct
  source 1..120: mol_type = other DNA
tggtttaatgagggagaggtttagttgagtgttggaattaatatttatagtttaagtaatttgcgaaatataattagttagtaagtgttggagttgggattcgattttgggtagatttag

SEQ ID NO: 663 - DNA, 120 bp, synthetic construct
  source 1..120: mol_type = other DNA
taatttaataaaaaaaaaactcaattaaatattaaaactaatactcacaacctaaatcatttaccaaacataactaactaataaatactaaaactaaaatccgatcctaaacaaattcaa

SEQ ID NO: 664 - DNA, 120 bp, synthetic construct
  source 1..120: mol_type = other DNA
tggtttaatgagggagaggtttagttgagtgttggaattaatatttatagtttaagttatttgttaaatataattagttagtaagtgttggagttgggattcgattttgggtagatttag

SEQ ID NO: 665 - DNA, 120 bp, synthetic construct
  source 1..120: mol_type = other DNA
ttattttttcaccaaacaatattctaaaataacaaacaccaaaaaaacttaaaatccaaataaaacccccttaactctataaaacttacatctaactcatatatcacttattttcttacc

SEQ ID NO: 666 - DNA, 120 bp, synthetic construct
  source 1..120: mol_type = other DNA
ttatttttttattaaatagtgttttaaaatgataagtattaaagggatttgagatttaggtgaaatttttttggttttatgaagtttgtatttaatttatgtattatttgtttttttatt

SEQ ID NO: 667 - DNA, 120 bp, synthetic construct
  source 1..120: mol_type = other DNA
ttattttttcaccaaacaatattctaaaataacaaacaccaaaaaaacttaaaatcaaaataaaccccccttaactctataaaacttacatctaactcatatatcacttattttcttacc

SEQ ID NO: 668 - DNA, 120 bp, synthetic construct
  source 1..120: mol_type = other DNA
ttatttttttattaaatagtgttttaaaatgataagtattaaagggatttgagattaaggtgaattttttttggttttatgaagtttgtatttaatttatgtattatttgtttttttatt

SEQ ID NO: 669 - DNA, 120 bp, synthetic construct; identical to SEQ ID NO: 665
  source 1..120: mol_type = other DNA

SEQ ID NO: 670 - DNA, 120 bp, synthetic construct; identical to SEQ ID NO: 666
  source 1..120: mol_type = other DNA

SEQ ID NO: 671 - DNA, 120 bp, synthetic construct; identical to SEQ ID NO: 667
  source 1..120: mol_type = other DNA

SEQ ID NO: 672 - DNA, 120 bp, synthetic construct; identical to SEQ ID NO: 668
  source 1..120: mol_type = other DNA

SEQ ID NO: 673 - DNA, 120 bp, synthetic construct
  source 1..120: mol_type = other DNA
atactcaatttaaaactcctcaaaacatctcctccccaaaacattatcactatttatcatacctcacaactacctaaaaaaaataccatttataaaatattatttaaactaactaacaac

SEQ ID NO: 674 - DNA, 120 bp, synthetic construct
  source 1..120: mol_type = other DNA
atatttagtttggagttttttaaaatgttttttttttagagtattgttattgtttattgtattttatagttgtttggaaaaggtgttatttgtagggtgttatttaaattgattggtagt

SEQ ID NO: 675 - DNA, 120 bp, synthetic construct
  source 1..120: mol_type = other DNA
atactcaatttaaaactcctcaaaacatctcctccccaaaacattatcactatttatcctaccacacaactacctaaaaaaaataccatttataaaatattatttaaactaactaacaac

SEQ ID NO: 676 - DNA, 120 bp, synthetic construct
  source 1..120: mol_type = other DNA
atatttagtttggagttttttaaaatgttttttttttagagtattgttattgtttattttattgtatagttgtttggaaaaggtgttatttgtagggtgttatttaaattgattggtagt

SEQ ID NO: 677 - DNA, 120 bp, synthetic construct
  source 1..120: mol_type = other DNA
atactcaatttaaaactcctcaaaacgtctcctccccaaaacattatcactatttatcgtacctcacaactacctaaaaaaaataccatttataaaatattatttaaactaactaacaac

SEQ ID NO: 678 - DNA, 120 bp, synthetic construct
  source 1..120: mol_type = other DNA
atatttagtttggagttttttaaaacgttttttttttagagtattgttattgtttatcgtattttatagttgtttggaaaaggtgttatttgtagggtgttatttaaattgattggtagt

SEQ ID NO: 679 - DNA, 120 bp, synthetic construct
  source 1..120: mol_type = other DNA
atactcaatttaaaactcctcaaaacgtctcctccccaaaacattatcactatttatcctaccgcacaactacctaaaaaaaataccatttataaaatattatttaaactaactaacaac

SEQ ID NO: 680 - DNA, 120 bp, synthetic construct
  source 1..120: mol_type = other DNA
atatttagtttggagttttttaaaacgttttttttttagagtattgttattgtttattttatcgtatagttgtttggaaaaggtgttatttgtagggtgttatttaaattgattggtagt

SEQ ID NO: 681 - DNA, 120 bp, synthetic construct
  source 1..120: mol_type = other DNA
taataatatttactccttaacttaaaaataaaattttatatttacttttaaaatactataaaataaacatcaccccttttaccacattattctatatccttccccctcttcaatatcaat

SEQ ID NO: 682 - DNA, 120 bp, synthetic construct
  source 1..120: mol_type = other DNA
tgatagtatttattttttgatttggggatagagttttgtgtttgtttttaaagtgttgtggagtagatgttattttttttgttatgttgttttgtatttttttttttttttagtgttagt

SEQ ID NO: 683 - DNA, 120 bp, synthetic construct
  source 1..120: mol_type = other DNA
taataatatttactccttaacttaaaaataaaattttatatttacttttaaaatactaaaaaaaaaacatcaccccttttaccacattattctatatccttccccctcttcaatatcaat

SEQ ID NO: 684 - DNA, 120 bp, synthetic construct
  source 1..120: mol_type = other DNA
tgatagtatttattttttgatttggggatagagttttgtgtttgtttttaaagtgttggggagaagatgttattttttttgttatgttgttttgtatttttttttttttttagtgttagt

SEQ ID NO: 685 - DNA, 120 bp, synthetic construct
  source 1..120: mol_type = other DNA
taataatatttactccttaacttaaaaataaaattttatatttacttttaaaatactataaaataaacgtcaccccttttaccacgttattctatatccttccccctcttcaatatcaat

SEQ ID NO: 686 - DNA, 120 bp, synthetic construct
  source 1..120: mol_type = other DNA
tgatagtatttattttttgatttggggatagagttttgtgtttgtttttaaagtgttgtggagtagacgttattttttttgttacgttgttttgtatttttttttttttttagtgttagt

SEQ ID NO: 687 - DNA, 120 bp, synthetic construct
  source 1..120: mol_type = other DNA
taataatatttactccttaacttaaaaataaaattttatatttacttttaaaatactaaaaaaaaaacgtcaccccttttaccacgttattctatatccttccccctcttcaatatcaat

SEQ ID NO: 688 - DNA, 120 bp, synthetic construct
  source 1..120: mol_type = other DNA
tgatagtatttattttttgatttggggatagagttttgtgtttgtttttaaagtgttggggagaagacgttattttttttgttacgttgttttgtatttttttttttttttagtgttagt

SEQ ID NO: 689 - DNA, 120 bp, synthetic construct
  source 1..120: mol_type = other DNA
ttttattcaccaatattcacataacttaaaaaaaaataaaaacttacacaacacctaaattaaattaattattaaatttttttaaattaaataactaattcttcattatattatattaat

SEQ ID NO: 690 - DNA, 120 bp, synthetic construct
  source 1..120: mol_type = other DNA
ttttatttattaatatttatatgatttgaggaaaaataagagtttgtatagtatttgaattagattggttgttagatttttttaaattaaataattaattttttattgtattatattgat

SEQ ID NO: 691 - DNA, 120 bp, synthetic construct
  source 1..120: mol_type = other DNA
ttttattcaccaatattcacataacttaaaaaaaaataaaaacttacacaacacctaaaatacattaattattaaatttttttaaattaaataactaattcttcattatattatattaat

SEQ ID NO: 692 - DNA, 120 bp, synthetic construct
  source 1..120: mol_type = other DNA
ttttatttattaatatttatatgatttgaggaaaaataagagtttgtatagtatttgaagtatattggttgttagatttttttaaattaaataattaattttttattgtattatattgat

SEQ ID NO: 693 - DNA, 120 bp, synthetic construct; identical to SEQ ID NO: 689
  source 1..120: mol_type = other DNA

SEQ ID NO: 694 - DNA, 120 bp, synthetic construct; identical to SEQ ID NO: 690
  source 1..120: mol_type = other DNA

SEQ ID NO: 695 - DNA, 120 bp, synthetic construct; identical to SEQ ID NO: 691
  source 1..120: mol_type = other DNA

SEQ ID NO: 696 - DNA, 120 bp, synthetic construct; identical to SEQ ID NO: 692
  source 1..120: mol_type = other DNA

SEQ ID NO: 697 - DNA, 120 bp, synthetic construct
  source 1..120: mol_type = other DNA
ataatttaccaaaaaaaaataatctaattatcacatccaccctaaataacatactaccaaacctaaaaactatactaataaacatttaaaaatattttctcaatacacatcttctaaaca

SEQ ID NO: 698 - DNA, 120 bp, synthetic construct
  source 1..120: mol_type = other DNA
ataatttgttaagaggaggtaatttaattattatgtttattttgaatagtatattgttaagtttaggaattgtgttggtgaatatttaaaaatatttttttaatgtatattttttaaata

SEQ ID NO: 699 - DNA, 120 bp, synthetic construct
  source 1..120: mol_type = other DNA
ataatttaccaaaaaaaaataatctaattatcacatccaccctaaataacatactaccatacataaaaactatactaataaacatttaaaaatattttctcaatacacatcttctaaaca

SEQ ID NO: 700 - DNA, 120 bp, synthetic construct
  source 1..120: mol_type = other DNA
ataatttgttaagaggaggtaatttaattattatgtttattttgaatagtatattgttatgtgtaggaattgtgttggtgaatatttaaaaatatttttttaatgtatattttttaaata

SEQ ID NO: 701 - DNA, 120 bp, synthetic construct
  source 1..120: mol_type = other DNA
ataatttaccaaaaaaaaataatctaattatcacgtccaccctaaataacatactaccaaacctaaaaactatactaataaacatttaaaaatattttctcaatacacatcttctaaaca

SEQ ID NO: 702 - DNA, 120 bp, synthetic construct
  source 1..120: mol_type = other DNA
ataatttgttaagaggaggtaatttaattattacgtttattttgaatagtatattgttaagtttaggaattgtgttggtgaatatttaaaaatatttttttaatgtatattttttaaata

SEQ ID NO: 703 - DNA, 120 bp, synthetic construct
  source 1..120: mol_type = other DNA
ataatttaccaaaaaaaaataatctaattatcacgtccaccctaaataacatactaccatacgtaaaaactatactaataaacatttaaaaatattttctcaatacacatcttctaaaca

SEQ ID NO: 704 - DNA, 120 bp, synthetic construct
  source 1..120: mol_type = other DNA
ataatttgttaagaggaggtaatttaattattacgtttattttgaatagtatattgttatgcgtaggaattgtgttggtgaatatttaaaaatatttttttaatgtatattttttaaata

SEQ ID NO: 705 - DNA, 120 bp, synthetic construct
  source 1..120: mol_type = other DNA
tatatatataaaaaattctatctaaaaatcatcaaaacctttttaaaaatcaactaatatcatattaacctttactaatatttctctacaaactctccaaacaacccaaccttatcacca

SEQ ID NO: 706 - DNA, 120 bp, synthetic construct
  source 1..120: mol_type = other DNA
tatatgtgtaagagattttatttaaaggttattagaatttttttgaaagttaattgatgttatgttggtttttgttggtgtttttttgtagattttttggatgatttagttttgttatta

SEQ ID NO: 707 - DNA, 120 bp, synthetic construct
  source 1..120: mol_type = other DNA
tatatatataaaaaattctatctaaaaatcatcaaaacctttttaaaaatcaactcatatcatataaacctttactaatatttctctacaaactctccaaacaacccaaccttatcacca

SEQ ID NO: 708 - DNA, 120 bp, synthetic construct
  source 1..120: mol_type = other DNA
tatatgtgtaagagattttatttaaaggttattagaatttttttgaaagttaatttatgttatgtgggtttttgttggtgtttttttgtagattttttggatgatttagttttgttatta

SEQ ID NO: 709 - DNA, 120 bp, synthetic construct
  source 1..120: mol_type = other DNA
tatatatataaaaaattctatctaaaaatcatcaaaacctttttaaaaatcaactaatatcatattaacctttactaatatttctctacaaactctccgaacgacccaaccttatcacca

SEQ ID NO: 710 - DNA, 120 bp, synthetic construct
  source 1..120: mol_type = other DNA
tatatgtgtaagagattttatttaaaggttattagaatttttttgaaagttaattgatgttatgttggtttttgttggtgtttttttgtagatttttcggacgatttagttttgttatta

SEQ ID NO: 711 - DNA, 120 bp, synthetic construct
  source 1..120: mol_type = other DNA
tatatatataaaaaattctatctaaaaatcatcaaaacctttttaaaaatcaactcatatcatataaacctttactaatatttctctacaaactctccgaacgacccaaccttatcacca

SEQ ID NO: 712 - DNA, 120 bp, synthetic construct
  source 1..120: mol_type = other DNA
tatatgtgtaagagattttatttaaaggttattagaatttttttgaaagttaatttatgttatgtgggtttttgttggtgtttttttgtagatttttcggacgatttagttttgttatta

SEQ ID NO: 713 - DNA, 120 bp, synthetic construct
  source 1..120: mol_type = other DNA
taaaaaactaaacatacaaaaaaaaattttaaccttaaaaaaaaaaatcaattcactcaaaaaaatatccatacctaaacacccactcaaaaataccacatctttcaaaccaactctacc

SEQ ID NO: 714 - DNA, 120 bp, synthetic construct
  source 1..120: mol_type = other DNA
tgaggagttaggtatgtagggaggagttttaattttggagaaagaggttaatttatttaggagggtgtttatgtttggatatttgtttagagatattatgttttttgggttagttttatt

SEQ ID NO: 715 - DNA, 120 bp, synthetic construct
  source 1..120: mol_type = other DNA
taaaaaactaaacatacaaaaaaaaattttaaccttaaaaaaaaaaatcaattcactaaaaaaactatccatacctaaacacccactcaaaaataccacatctttcaaaccaactctacc

SEQ ID NO: 716 - DNA, 120 bp, synthetic construct
  source 1..120: mol_type = other DNA
tgaggagttaggtatgtagggaggagttttaattttggagaaagaggttaatttattgaggaggttgtttatgtttggatatttgtttagagatattatgttttttgggttagttttatt

SEQ ID NO: 717 - DNA, 120 bp, synthetic construct
  source 1..120: mol_type = other DNA
taaaaaactaaacatacaaaaaaaaattttaaccttaaaaaaaaaaatcaattcactcaaaaaaatatccatacctaaacacccgctcaaaaataccacgtctttcgaaccaactctacc

SEQ ID NO: 718 - DNA, 120 bp, synthetic construct
  source 1..120: mol_type = other DNA
tgaggagttaggtatgtagggaggagttttaattttggagaaagaggttaatttatttaggagggtgtttatgtttggatattcgtttagagatattacgtttttcgggttagttttatt

SEQ ID NO: 719 - DNA, 120 bp, synthetic construct
  source 1..120: mol_type = other DNA
taaaaaactaaacatacaaaaaaaaattttaaccttaaaaaaaaaaatcaattcactaaaaaaactatccatacctaaacacccgctcaaaaataccacgtctttcgaaccaactctacc

SEQ ID NO: 720 - DNA, 120 bp, synthetic construct
  source 1..120: mol_type = other DNA
tgaggagttaggtatgtagggaggagttttaattttggagaaagaggttaatttattgaggaggttgtttatgtttggatattcgtttagagatattacgtttttcgggttagttttatt

SEQ ID NO: 721 - DNA, 120 bp, synthetic construct
  source 1..120: mol_type = other DNA
caaaaaaaatatttaaaattaaaaaaaaaaaataacaaatatattaaatattttccactacaaaataaaaaaaaatcattaactttaaactaaaaaaaaccttaacccaacattcctaaa

SEQ ID NO: 722 - DNA, 120 bp, synthetic construct
  source 1..120: mol_type = other DNA
taaaaggaatatttaaaattaaaaaaaaggaatgatagatgtgttagatattttttattgtagaatgggaaaagattattgattttaggttgaggaaagttttgatttagtatttttaaa

SEQ ID NO: 723 - DNA, 120 bp, synthetic construct
  source 1..120: mol_type = other DNA
caaaaaaaatatttaaaattaaaaaaaaaaaataacaaatatattaaatattttcccctacaaactaaaaaaaaatcattaactttaaactaaaaaaaaccttaacccaacattcctaaa

SEQ ID NO: 724 - DNA, 120 bp, synthetic construct
  source 1..120: mol_type = other DNA
taaaaggaatatttaaaattaaaaaaaaggaatgatagatgtgttagatatttttttttgtagattgggaaaagattattgattttaggttgaggaaagttttgatttagtatttttaaa

SEQ ID NO: 725 - DNA, 120 bp, synthetic construct; identical to SEQ ID NO: 721
  source 1..120: mol_type = other DNA

SEQ ID NO: 726 - DNA, 120 bp, synthetic construct; identical to SEQ ID NO: 722
  source 1..120: mol_type = other DNA

SEQ ID NO: 727 - DNA, 120 bp, synthetic construct; identical to SEQ ID NO: 723
  source 1..120: mol_type = other DNA

SEQ ID NO: 728 - DNA, 120 bp, synthetic construct; identical to SEQ ID NO: 724
  source 1..120: mol_type = other DNA

SEQ ID NO: 729 - DNA, 120 bp, synthetic construct
  source 1..120: mol_type = other DNA
ataaaatcacattaatcattaaaatataaccacaaccactatctctaaacattaataaaacaccttttatatacaaaacacaaaactatttattatacatacattttaaaacctaaccct

SEQ ID NO: 730 - DNA, 120 bp, synthetic construct
  source 1..120: mol_type = other DNA
atgaaattatattggttattaaagtatgattatagttattgtttttaaatattagtggaatattttttatgtgtaagatatagagttatttattatatatatattttagaatttaatttt

SEQ ID NO: 731 - DNA, 120 bp, synthetic construct
  source 1..120: mol_type = other DNA
ataaaatcacattaatcattaaaatataaccacaaccactatctctaaacattaatcaaacacctattatatacaaaacacaaaactatttattatacatacattttaaaacctaaccct

SEQ ID NO: 732 - DNA, 120 bp, synthetic construct
  source 1..120: mol_type = other DNA
atgaaattatattggttattaaagtatgattatagttattgtttttaaatattagttgaatatttgttatgtgtaagatatagagttatttattatatatatattttagaatttaatttt

SEQ ID NO: 733 - DNA, 120 bp, synthetic construct; identical to SEQ ID NO: 729
  source 1..120: mol_type = other DNA

SEQ ID NO: 734 - DNA, 120 bp, synthetic construct; identical to SEQ ID NO: 730
  source 1..120: mol_type = other DNA

SEQ ID NO: 735 - DNA, 120 bp, synthetic construct
  source 1..120: mol_type = other DNA
ataaaatcacattaatcattaaaatataaccacaaccactatctctaaacattaatcgaacacctattatatacaaaacacaaaactatttattatacatacattttaaaacctaaccct

SEQ ID NO: 736 - DNA, 120 bp, synthetic construct
  source 1..120: mol_type = other DNA
atgaaattatattggttattaaagtatgattatagttattgtttttaaatattagtcgaatatttgttatgtgtaagatatagagttatttattatatatatattttagaatttaatttt

SEQ ID NO: 737 - DNA, 120 bp, synthetic construct
  source 1..120: mol_type = other DNA
aacatctaacttaaatatatttcaaaactaacataaataacttctaatcctaaaataacatacattatcccataaattccacctaatttcattccattcactaaatccccaaaaaaacta

SEQ ID NO: 738 - DNA, 120 bp, synthetic construct
  source 1..120: mol_type = other DNA
gatgtttgatttgaatgtgttttaaagttaatgtaagtaatttttagttttggagtgatgtgtattgttttatgaattttatttgattttattttatttattgaatttttagaagggttg

SEQ ID NO: 739 - DNA, 120 bp, synthetic construct
  source 1..120: mol_type = other DNA
aacatctaacttaaatatatttcaaaactaacataaataacttctaatcctaaaataacttccattatcccataaattccacctaatttcattccattcactaaatccccaaaaaaacta

SEQ ID NO: 740 - DNA, 120 bp, synthetic construct
  source 1..120: mol_type = other DNA
gatgtttgatttgaatgtgttttaaagttaatgtaagtaatttttagttttggagtgatttttattgttttatgaattttatttgattttattttatttattgaatttttagaagggttg

SEQ ID NO: 741 - DNA, 120 bp, synthetic construct
  source 1..120: mol_type = other DNA
aacgtctaacttaaatatatttcaaaactaacgtaaataacttctaatcctaaaataacgtacattatcccataaattccacctaatttcattccattcactaaatccccaaaaaaacta

SEQ ID NO: 742 - DNA, 120 bp, synthetic construct
  source 1..120: mol_type = other DNA
gacgtttgatttgaatgtgttttaaagttaacgtaagtaatttttagttttggagtgacgtgtattgttttatgaattttatttgattttattttatttattgaatttttagaagggttg

SEQ ID NO: 743 - DNA, 120 bp, synthetic construct
  source 1..120: mol_type = other DNA
aacgtctaacttaaatatatttcaaaactaacgtaaataacttctaatcctaaaataacttccattatcccataaattccacctaatttcattccattcactaaatccccaaaaaaacta

SEQ ID NO: 744 - DNA, 120 bp, synthetic construct
  source 1..120: mol_type = other DNA
gacgtttgatttgaatgtgttttaaagttaacgtaagtaatttttagttttggagtgatttttattgttttatgaattttatttgattttattttatttattgaatttttagaagggttg

SEQ ID NO: 745 - DNA, 120 bp, synthetic construct
  source 1..120: mol_type = other DNA
cataataacaatcaaaccccaacatcaaccataaaaaaacacaaaaaatcccaataacttatcaattcactaataacaaaaaataaaacctttaccaatttaaaactacctcaaaatatt

SEQ ID NO: 746 - DNA, 120 bp, synthetic construct
  source 1..120: mol_type = other DNA
tatagtggtagttaggttttagtgttaattgtgggagagtatggaggattttagtggtttgttaatttgttgatagtagaaggtagggtttttgttagtttggagttgttttagggtgtt

SEQ ID NO: 747 - DNA, 120 bp, synthetic construct
  source 1..120: mol_type = other DNA
cataataacaatcaaaccccaacatcaaccataaaaaaacacaaaaaatcccaataactaaacaattcactaataacaaaaaataaaacctttaccaatttaaaactacctcaaaatatt

SEQ ID NO: 748 - DNA, 120 bp, synthetic construct
  source 1..120: mol_type = other DNA
tatagtggtagttaggttttagtgttaattgtgggagagtatggaggattttagtggttgggtaatttgttgatagtagaaggtagggtttttgttagtttggagttgttttagggtgtt

SEQ ID NO: 749 - DNA, 120 bp, synthetic construct
  source 1..120: mol_type = other DNA
cataataacaatcaaaccccaacgtcaaccgtaaaaaaacacgaaaaatcccaataacttatcaattcgctaataacaaaaaataaaacctttaccaatttaaaactacctcaaaatatt

SEQ ID NO: 750 - DNA, 120 bp, synthetic construct
  source 1..120: mol_type = other DNA
tatagtggtagttaggttttagcgttaatcgtgggagagtacggaggattttagtggtttgttaattcgttgatagtagaaggtagggtttttgttagtttggagttgttttagggtgtt

SEQ ID NO: 751 - DNA, 120 bp, synthetic construct
  source 1..120: mol_type = other DNA
cataataacaatcaaaccccaacgtcaaccgtaaaaaaacacgaaaaatcccaataactaaacaattcgctaataacaaaaaataaaacctttaccaatttaaaactacctcaaaatatt

SEQ ID NO: 752 - DNA, 120 bp, synthetic construct
  source 1..120: mol_type = other DNA
tatagtggtagttaggttttagcgttaatcgtgggagagtacggaggattttagtggttgggtaattcgttgatagtagaaggtagggtttttgttagtttggagttgttttagggtgtt

SEQ ID NO: 753 - DNA, 120 bp, synthetic construct
  source 1..120: mol_type = other DNA
aacaaaaaacctattcaacaccataataaaaaaaaaaaaaaatcataaataaatatataccaacaatcttaaatctactcatatacctaaatatacactaaaatctactaaaaaaaaaaa

SEQ ID NO: 754 - DNA, 120 bp, synthetic construct
  source 1..120: mol_type = other DNA
ggtagggggtttatttaatattatgatgaaggaaggaaaggattatggatgaatatatattagtgattttgaatttatttatatgtttaggtgtatattgagatttgttggaaggaaaga

SEQ ID NO: 755 - DNA, 120 bp, synthetic construct
  source 1..120: mol_type = other DNA
aacaaaaaacctattcaacaccataataaaaaaaaaaaaaaatcataaataaataaataccaacactcttaaatctactcatatacctaaatatacactaaaatctactaaaaaaaaaaa

SEQ ID NO: 756 - DNA, 120 bp, synthetic construct
  source 1..120: mol_type = other DNA
ggtagggggtttatttaatattatgatgaaggaaggaaaggattatggatgaatagatattagtgtttttgaatttatttatatgtttaggtgtatattgagatttgttggaaggaaaga

SEQ ID NO: 757 - DNA, 120 bp, synthetic construct
  source 1..120: mol_type = other DNA
aacaaaaaacctattcaacaccataataaaaaaaaaaaaaaatcataaataaatatataccaacgatcttaaatctactcatatacctaaatatacactaaaatctactaaaaaaaaaaa

SEQ ID NO: 758 - DNA, 120 bp, synthetic construct
  source 1..120: mol_type = other DNA
ggtagggggtttatttaatattatgatgaaggaaggaaaggattatggatgaatatatattagcgattttgaatttatttatatgtttaggtgtatattgagatttgttggaaggaaaga

SEQ ID NO: 759 - DNA, 120 bp, synthetic construct
  source 1..120: mol_type = other DNA
aacaaaaaacctattcaacaccataataaaaaaaaaaaaaaatcataaataaataaataccaacgctcttaaatctactcatatacctaaatatacactaaaatctactaaaaaaaaaaa

SEQ ID NO: 760 - DNA, 120 bp, synthetic construct
  source 1..120: mol_type = other DNA
ggtagggggtttatttaatattatgatgaaggaaggaaaggattatggatgaatagatattagcgtttttgaatttatttatatgtttaggtgtatattgagatttgttggaaggaaaga

SEQ ID NO: 761 - DNA, 120 bp, synthetic construct
  source 1..120: mol_type = other DNA
aaaccaaccccaactaacacaaaaacctcccaaaacttcaacctaaaatttaacaaaacaacctctactataaaatcacaaacatcaaccacatacaaactctaaaaaaaatattattaa

SEQ ID NO: 762 - DNA, 120 bp, synthetic construct
  source 1..120: mol_type = other DNA
gagttagttttaattagtatagggattttttaaaattttagtttaggatttagtagagtaatttttgttgtgagattataagtattggttatatgtgagttttgggaagaatgttattaa

SEQ ID NO: 763 - DNA, 120 bp, synthetic construct
  source 1..120: mol_type = other DNA
aaaccaaccccaactaacacaaaaacctcccaaaacttcaacctaaaatttaacaaaccaacctatactataaaatcacaaacatcaaccacatacaaactctaaaaaaaatattattaa

SEQ ID NO: 764 - DNA, 120 bp, synthetic construct
  source 1..120: mol_type = other DNA
gagttagttttaattagtatagggattttttaaaattttagtttaggatttagtagattaatttgtgttgtgagattataagtattggttatatgtgagttttgggaagaatgttattaa

SEQ ID NO: 765 - DNA, 120 bp, synthetic construct
  source 1..120: mol_type = other DNA
aaaccaaccccaactaacacaaaaacctcccaaaacttcaacctaaaatttaacaaaacaacctctactataaaatcacaaacatcgaccacatacgaactctaaaaaaaatattattaa

SEQ ID NO: 766 - DNA, 120 bp, synthetic construct
  source 1..120: mol_type = other DNA
gagttagttttaattagtatagggattttttaaaattttagtttaggatttagtagagtaatttttgttgtgagattataagtatcggttatatgcgagttttgggaagaatgttattaa

SEQ ID NO: 767 - DNA, 120 bp, synthetic construct
  source 1..120: mol_type = other DNA
aaaccaaccccaactaacacaaaaacctcccaaaacttcaacctaaaatttaacaaaccaacctatactataaaatcacaaacatcgaccacatacgaactctaaaaaaaatattattaa

SEQ ID NO: 768 - DNA, 120 bp, synthetic construct
  source 1..120: mol_type = other DNA
gagttagttttaattagtatagggattttttaaaattttagtttaggatttagtagattaatttgtgttgtgagattataagtatcggttatatgcgagttttgggaagaatgttattaa

SEQ ID NO: 769 - DNA, 120 bp, synthetic construct
  source 1..120: mol_type = other DNA
attatcatttttaataattatactaaaattatattcccttatataactatatatatctaaacatttaaacaacaaaccaaataacctacttaattctcaaaataaataacaattcataaa

SEQ ID NO: 770 - DNA, 120 bp, synthetic construct
  source 1..120: mol_type = other DNA
attattatttttaatagttatattgaaattatatttttttatgtgattgtatgtatttaagtatttaaatggtaaattaaatgatttatttggtttttagaatagatgatagtttataga

SEQ ID NO: 771 - DNA, 120 bp, synthetic construct
  source 1..120: mol_type = other DNA
attatcatttttaataattatactaaaattatattcccttatataactatatatatataaacattaaaacaacaaaccaaataacctacttaattctcaaaataaataacaattcataaa

SEQ ID NO: 772 - DNA, 120 bp, synthetic construct
  source 1..120: mol_type = other DNA
attattatttttaatagttatattgaaattatatttttttatgtgattgtatgtatgtaagtattgaaatggtaaattaaatgatttatttggtttttagaatagatgatagtttataga

SEQ ID NO: 773 - DNA, 120 bp, synthetic construct
  source 1..120: mol_type = other DNA
attatcatttttaataattatactaaaattatattcccttatataactatatatatctaaacatttaaacgacaaaccaaataacctacttaattctcaaaataaataacaattcataaa

SEQ ID NO: 774 - DNA, 120 bp, synthetic construct
  source 1..120: mol_type = other DNA
attattatttttaatagttatattgaaattatatttttttatgtgattgtatgtatttaagtatttaaacggtaaattaaatgatttatttggtttttagaatagatgatagtttataga

SEQ ID NO: 775 - DNA, 120 bp, synthetic construct
  source 1..120: mol_type = other DNA
attatcatttttaataattatactaaaattatattcccttatataactatatatatataaacattaaaacgacaaaccaaataacctacttaattctcaaaataaataacaattcataaa

SEQ ID NO: 776 - DNA, 120 bp, synthetic construct
  source 1..120: mol_type = other DNA
attattatttttaatagttatattgaaattatatttttttatgtgattgtatgtatgtaagtattgaaacggtaaattaaatgatttatttggtttttagaatagatgatagtttataga

SEQ ID NO: 777 - DNA, 120 bp, synthetic construct
  source 1..120: mol_type = other DNA
cttcctcaattcttaaaccccctctaaacaaaattcacctatccccaaaaataaaacacaccccaaccttatatataaatctcttccaccacaactcacttccaaaataatcaaaactaa

SEQ ID NO: 778 - DNA, 120 bp, synthetic construct
  source 1..120: mol_type = other DNA
tttttttagtttttaaattttttttgggtagggtttatttgtttttgggggtggagtatattttggttttgtatgtggattttttttattgtagtttatttttagagtggttagaattgg

SEQ ID NO: 779 - DNA, 120 bp, synthetic construct
  source 1..120: mol_type = other DNA
cttcctcaattcttaaaccccctctaaacaaaattcacctatccccaaaaataaaacaaacccaaaccttatatataaatctcttccaccacaactcacttccaaaataatcaaaactaa

SEQ ID NO: 780 - DNA, 120 bp, synthetic construct
  source 1..120: mol_type = other DNA
tttttttagtttttaaattttttttgggtagggtttatttgtttttgggggtggagtagatttaggttttgtatgtggattttttttattgtagtttatttttagagtggttagaattgg

SEQ ID NO: 781 - DNA, 120 bp, synthetic construct
  source 1..120: mol_type = other DNA
cttcctcaattcttaaaccccctctaaacaaaattcacctatccccgaaaataaaacacaccccgaccttatatataaatctcttccaccgcaactcacttccaaaataatcaaaactaa

SEQ ID NO: 782 - DNA, 120 bp, synthetic construct
  source 1..120: mol_type = other DNA
tttttttagtttttaaattttttttgggtagggtttatttgttttcgggggtggagtatatttcggttttgtatgtggattttttttatcgtagtttatttttagagtggttagaattgg

SEQ ID NO: 783 - DNA, 120 bp, synthetic construct
  source 1..120: mol_type = other DNA
cttcctcaattcttaaaccccctctaaacaaaattcacctatccccgaaaataaaacaaacccaaaccttatatataaatctcttccaccgcaactcacttccaaaataatcaaaactaa

SEQ ID NO: 784 - DNA, 120 bp, synthetic construct
  source 1..120: mol_type = other DNA
tttttttagtttttaaattttttttgggtagggtttatttgttttcgggggtggagtagatttaggttttgtatgtggattttttttatcgtagtttatttttagagtggttagaattgg

SEQ ID NO: 785 - DNA, 120 bp, synthetic construct
  source 1..120: mol_type = other DNA
ataacatcattatcataaaacacatttattaaaacttataatacaataactactttaaatcacttaaaataaatcaactaacctcacaaaacaccaaactaatacaattattaaaaatta

SEQ ID NO: 786 - DNA, 120 bp, synthetic construct
  source 1..120: mol_type = other DNA
gtagtattattgttatgaaatgtatttattaaaatttgtggtataataattgttttaggttatttaaaatgaattaattaattttataaaatattaagttaatgtaattattggagatta

SEQ ID NO: 787 - DNA, 120 bp, synthetic construct
  source 1..120: mol_type = other DNA
ataacatcattatcataaaacacatttattaaaacttataatacaataactactttacatcactaaaaataaatcaactaacctcacaaaacaccaaactaatacaattattaaaaatta

SEQ ID NO: 788 - DNA, 120 bp, synthetic construct
  source 1..120: mol_type = other DNA
gtagtattattgttatgaaatgtatttattaaaatttgtggtataataattgttttatgttattgaaaatgaattaattaattttataaaatattaagttaatgtaattattggagatta

SEQ ID NO: 789 - DNA, 120 bp, synthetic construct
  source 1..120: mol_type = other DNA
ataacatcattatcataaaacgcatttattaaaacttataatacaataactactttaaatcacttaaaataaatcaactaacctcacaaaacaccaaactaatacaattattaaaaatta

SEQ ID NO: 790 - DNA, 120 bp, synthetic construct
  source 1..120: mol_type = other DNA
gtagtattattgttatgaaacgtatttattaaaatttgtggtataataattgttttaggttatttaaaatgaattaattaattttataaaatattaagttaatgtaattattggagatta

SEQ ID NO: 791 - DNA, 120 bp, synthetic construct
  source 1..120: mol_type = other DNA
ataacatcattatcataaaacgcatttattaaaacttataatacaataactactttacgtcactaaaaataaatcaactaacctcacaaaacaccaaactaatacaattattaaaaatta

SEQ ID NO: 792 - DNA, 120 bp, synthetic construct
  source 1..120: mol_type = other DNA
gtagtattattgttatgaaacgtatttattaaaatttgtggtataataattgttttacgttattgaaaatgaattaattaattttataaaatattaagttaatgtaattattggagatta

SEQ ID NO: 793 - DNA, 120 bp, synthetic construct
  source 1..120: mol_type = other DNA
taccaaaaacttactcaataaaaataatatatcaaaatactaaataaaatttacaactcccctaacaaataacttcttattaccattccaaacaacaaatcattaattttcctccttaaa

SEQ ID NO: 794 - DNA, 120 bp, synthetic construct
  source 1..120: mol_type = other DNA
tattaagaatttatttggtaaaaatagtatattaggatgttaaatgaaatttatgatttttttggtaaataattttttattgttattttaaataataggttattggtttttttttttagg

SEQ ID NO: 795 - DNA, 120 bp, synthetic construct
  source 1..120: mol_type = other DNA
taccaaaaacttactcaataaaaataatatatcaaaatactaaataaaatttacaaatcccctaaaaaataacttcttattaccattccaaacaacaaatcattaattttcctccttaaa

SEQ ID NO: 796 - DNA, 120 bp, synthetic construct
  source 1..120: mol_type = other DNA
tattaagaatttatttggtaaaaatagtatattaggatgttaaatgaaatttatgagttttttggaaaataattttttattgttattttaaataataggttattggtttttttttttagg

SEQ ID NO: 797 - DNA, 120 bp, synthetic construct
  source 1..120: mol_type = other DNA
taccaaaaacttactcgataaaaataatatatcaaaatactaaataaaatttacgactcccctaacaaataacttcttattaccattccaaacaacaaatcattaattttcctccttaaa

SEQ ID NO: 798 - DNA, 120 bp, synthetic construct
  source 1..120: mol_type = other DNA
tattaagaatttattcggtaaaaatagtatattaggatgttaaatgaaatttacgatttttttggtaaataattttttattgttattttaaataataggttattggtttttttttttagg

SEQ ID NO: 799 - DNA, 120 bp, synthetic construct
  source 1..120: mol_type = other DNA
taccaaaaacttactcgataaaaataatatatcaaaatactaaataaaatttacgaatcccctaaaaaataacttcttattaccattccaaacaacaaatcattaattttcctccttaaa

SEQ ID NO: 800 - DNA, 120 bp, synthetic construct
  source 1..120: mol_type = other DNA
tattaagaatttattcggtaaaaatagtatattaggatgttaaatgaaatttacgagttttttggaaaataattttttattgttattttaaataataggttattggtttttttttttagg

SEQ ID NO: 801 - DNA, 120 bp, synthetic construct
  source 1..120: mol_type = other DNA
ttatctacacattaaccaaatcataaaaaataaaaaaaactataaaaattttctcaatattaaaaaccaccaaacaatcactaacaataaaattataaattcaacaattccatactatat

SEQ ID NO: 802 - DNA, 120 bp, synthetic construct
  source 1..120: mol_type = other DNA
ttatttgtatattaattaagttatggaaaatggaagaagttgtgaagatttttttaatattgagagttattagataattgttgataataaaattgtgaatttagtaattttatgttgtgt

SEQ ID NO: 803 - DNA, 120 bp, synthetic construct
  source 1..120: mol_type = other DNA
ttatctacacattaaccaaatcataaaaaataaaaaaaactataaaaattttctcaatatacaaaaccaccaaacaatcactaacaataaaattataaattcaacaattccatactatat

SEQ ID NO: 804 - DNA, 120 bp, synthetic construct
  source 1..120: mol_type = other DNA
ttatttgtatattaattaagttatggaaaatggaagaagttgtgaagatttttttaatatgtagagttattagataattgttgataataaaattgtgaatttagtaattttatgttgtgt

SEQ ID NO: 805 - DNA, 120 bp, synthetic construct
  source 1..120: mol_type = other DNA
ttatctacacattaaccaaatcataaaaaataaaaaaaactataaaaattttctcaatattaaaaaccaccaaacaatcgctaacaataaaattataaattcaacaattccatactatat

SEQ ID NO: 806 - DNA, 120 bp, synthetic construct
  source 1..120: mol_type = other DNA
ttatttgtatattaattaagttatggaaaatggaagaagttgtgaagatttttttaatattgagagttattagataatcgttgataataaaattgtgaatttagtaattttatgttgtgt

SEQ ID NO: 807 - DNA, 120 bp, synthetic construct
  source 1..120: mol_type = other DNA
ttatctacacattaaccaaatcataaaaaataaaaaaaactataaaaattttctcaatatacaaaaccaccaaacaatcgctaacaataaaattataaattcaacaattccatactatat

SEQ ID NO: 808 - DNA, 120 bp, synthetic construct
  source 1..120: mol_type = other DNA
ttatttgtatattaattaagttatggaaaatggaagaagttgtgaagatttttttaatatgtagagttattagataatcgttgataataaaattgtgaatttagtaattttatgttgtgt

SEQ ID NO: 809 - DNA, 120 bp, synthetic construct
  source 1..120: mol_type = other DNA
aaaccaaatccatttaaaatcataatcaaaatcttctaaaaaaaaactacatcattactaataataccaataaataaaaaaaaaactaaaaaaaattcaacctcacaaaaaaactaaaaa

SEQ ID NO: 810 - DNA, 120 bp, synthetic construct
  source 1..120: mol_type = other DNA
ggattaggtttatttggagttatggttaaggttttttggagagagattgtattattgttgatggtattagtgagtgaggaggaaattgaaaagagtttagttttataggaaggttggaaa

SEQ ID NO: 811 - DNA, 120 bp, synthetic construct
  source 1..120: mol_type = other DNA
aaaccaaatccatttaaaatcataatcaaaatcttctaaaaaaaaactacatcattactacaaataccaataaataaaaaaaaaactaaaaaaaattcaacctcacaaaaaaactaaaaa

SEQ ID NO: 812 - DNA, 120 bp, synthetic construct
  source 1..120: mol_type = other DNA
ggattaggtttatttggagttatggttaaggttttttggagagagattgtattattgttgtaggtattagtgagtgaggaggaaattgaaaagagtttagttttataggaaggttggaaa

SEQ ID NO: 813 - DNA, 120 bp, synthetic construct; identical to SEQ ID NO: 809
  source 1..120: mol_type = other DNA

SEQ ID NO: 814 - DNA, 120 bp, synthetic construct; identical to SEQ ID NO: 810
  source 1..120: mol_type = other DNA

SEQ ID NO: 815 - DNA, 120 bp, synthetic construct; identical to SEQ ID NO: 811
  source 1..120: mol_type = other DNA

SEQ ID NO: 816 - DNA, 120 bp, synthetic construct; identical to SEQ ID NO: 812
  source 1..120: mol_type = other DNA

SEQ ID NO: 817 - DNA, 120 bp, synthetic construct
  source 1..120: mol_type = other DNA
ttttaaacatcacaaattatatccccaaaaaccaaactctaaaaaaacatttcataaaaacatacctataaaaaaaaccacacctataaaaaataaaaaacaaaaacaaaaataaacaaa

SEQ ID NO: 818 - DNA, 120 bp, synthetic construct
  source 1..120: mol_type = other DNA
ttttaagtattataggttgtatttttagaaattagattttaaagaggtattttatgaaggtgtgtttgtgggagggattatatttgtggaaggtaggggatagaagtaggagtgggtaga

SEQ ID NO: 819 - DNA, 120 bp, synthetic construct
  source 1..120: mol_type = other DNA
ttttaaacatcacaaattatatccccaaaaaccaaactctaaaaaaacatttcataaaaaactacctataaaaaaaaccacacctataaaaaataaaaaacaaaaacaaaaataaacaaa

SEQ ID NO: 820 - DNA, 120 bp, synthetic construct
  source 1..120: mol_type = other DNA
ttttaagtattataggttgtatttttagaaattagattttaaagaggtattttatgaagggttgtttgtgggagggattatatttgtggaaggtaggggatagaagtaggagtgggtaga

SEQ ID NO: 821 - DNA, 120 bp, synthetic construct
  source 1..120: mol_type = other DNA
ttttaaacatcacaaattatatccccaaaaaccaaactctaaaaaaacatttcataaaaacgtacctataaaaaaaaccacacctataaaaaataaaaaacaaaaacaaaaataaacaaa

SEQ ID NO: 822 - DNA, 120 bp, synthetic construct
  source 1..120: mol_type = other DNA
ttttaagtattataggttgtatttttagaaattagattttaaagaggtattttatgaaggcgtgtttgtgggagggattatatttgtggaaggtaggggatagaagtaggagtgggtaga

SEQ ID NO: 823 - DNA, 120 bp, synthetic construct; identical to SEQ ID NO: 819
  source 1..120: mol_type = other DNA

SEQ ID NO: 824 - DNA, 120 bp, synthetic construct; identical to SEQ ID NO: 820
  source 1..120: mol_type = other DNA

SEQ ID NO: 825 - DNA, 120 bp, synthetic construct
  source 1..120: mol_type = other DNA
aaaaaaattaaatcaaacaaatccaattaaaaaacactttaataaactttaacttccttaaataaaaaatataaaaaaaaacctatctaaatcataaactatatctataaattcccacaa

SEQ ID NO: 826 - DNA, 120 bp, synthetic construct
  source 1..120: mol_type = other DNA
gggaggattaggttaaataagtttaattaaaagatattttaataagttttagtttttttaggtaaggaatgtaagaaggagtttgtttggattatagattatgtttatgaatttttatag

SEQ ID NO: 827 - DNA, 120 bp, synthetic construct
  source 1..120: mol_type = other DNA
aaaaaaattaaatcaaacaaatccaattaaaaaacactttaataaactttaacttccttacctaaaaaatataaaaaaaaacctatctaaatcataaactatatctataaattcccacaa

SEQ ID NO: 828 - DNA, 120 bp, synthetic construct
  source 1..120: mol_type = other DNA
gggaggattaggttaaataagtttaattaaaagatattttaataagttttagtttttttatttaaggaatgtaagaaggagtttgtttggattatagattatgtttatgaatttttatag

SEQ ID NO: 829 - DNA, 120 bp, synthetic construct; identical to SEQ ID NO: 825
  source 1..120: mol_type = other DNA

SEQ ID NO: 830 - DNA, 120 bp, synthetic construct; identical to SEQ ID NO: 826
  source 1..120: mol_type = other DNA

SEQ ID NO: 831 - DNA, 120 bp, synthetic construct; identical to SEQ ID NO: 827
  source 1..120: mol_type = other DNA

SEQ ID NO: 832 - DNA, 120 bp, synthetic construct; identical to SEQ ID NO: 828
  source 1..120: mol_type = other DNA

SEQ ID NO: 833 - DNA, 120 bp, synthetic construct
  source 1..120: mol_type = other DNA
caaaatatcaaattctaccaaaataaaaaaaaccaccttaaatactctactaacctcaccaacaaaattacacaaatacttcttaccatctctttataaaattccaaactacctcaaaca

SEQ ID NO: 834 - DNA, 120 bp, synthetic construct
  source 1..120: mol_type = other DNA
tagagtgttgggttttgttagaatgaaaggggttattttgggtgttttattggttttattaataagattatataagtattttttattatttttttgtagagttttaggttattttgggta

SEQ ID NO: 835 - DNA, 120 bp, synthetic construct
  source 1..120: mol_type = other DNA
caaaatatcaaattctaccaaaataaaaaaaaccaccttaaatactctactaacctcacccccaaaattacacaaatacttcttaccatctctttataaaattccaaactacctcaaaca

SEQ ID NO: 836 - DNA, 120 bp, synthetic construct
  source 1..120: mol_type = other DNA
tagagtgttgggttttgttagaatgaaaggggttattttgggtgttttattggttttatttttaagattatataagtattttttattatttttttgtagagttttaggttattttgggta

SEQ ID NO: 837 - DNA, 120 bp, synthetic construct
  source 1..120: mol_type = other DNA
caaaatatcgaattctaccaaaataaaaaaaaccaccttaaatactctactaacctcaccaacaaaattacacaaatacttcttaccatctctttataaaattccaaactacctcgaaca

SEQ ID NO: 838 - DNA, 120 bp, synthetic construct
  source 1..120: mol_type = other DNA
tagagtgtcgggttttgttagaatgaaaggggttattttgggtgttttattggttttattaataagattatataagtattttttattatttttttgtagagttttaggttatttcgggta

SEQ ID NO: 839 - DNA, 120 bp, synthetic construct
  source 1..120: mol_type = other DNA
caaaatatcgaattctaccaaaataaaaaaaaccaccttaaatactctactaacctcacccccaaaattacacaaatacttcttaccatctctttataaaattccaaactacctcgaaca

SEQ ID NO: 840 - DNA, 120 bp, synthetic construct
  source 1..120: mol_type = other DNA
tagagtgtcgggttttgttagaatgaaaggggttattttgggtgttttattggttttatttttaagattatataagtattttttattatttttttgtagagttttaggttatttcgggta

SEQ ID NO: 841 - DNA, 120 bp, synthetic construct
  source 1..120: mol_type = other DNA
cataaatcacatatctaaaaaaaaacactaataaaaaataaactccaacatcacacataaacttaccctaaaatactcaatctttctaataaaaattaccttaaaaaaataaaaatactt

SEQ ID NO: 842 - DNA, 120 bp, synthetic construct
  source 1..120: mol_type = other DNA
tatggattatatatttagaaagaaatattggtgaggagtaagttttaatattatgtatgaatttgttttaaaatatttagtttttttgatgaagattattttaagaaagtgaaaatattt

SEQ ID NO: 843 - DNA, 120 bp, synthetic construct
  source 1..120: mol_type = other DNA
cataaatcacatatctaaaaaaaaacactaataaaaaataaactccaacatcacacataatattaccctaaaatactcaatctttctaataaaaattaccttaaaaaaataaaaatactt

SEQ ID NO: 844 - DNA, 120 bp, synthetic construct
  source 1..120: mol_type = other DNA
tatggattatatatttagaaagaaatattggtgaggagtaagttttaatattatgtatgatgttgttttaaaatatttagtttttttgatgaagattattttaagaaagtgaaaatattt

SEQ ID NO: 845 - DNA, 120 bp, synthetic construct
  source 1..120: mol_type = other DNA
cataaatcacatatctaaaaaaaaacactaataaaaaataaactccaacatcacgcataaacttaccctaaaatactcaatctttctaataaaaattaccttaaaaaaataaaaatactt

SEQ ID NO: 846 - DNA, 120 bp, synthetic construct
  source 1..120: mol_type = other DNA
tatggattatatatttagaaagaaatattggtgaggagtaagttttaatattacgtatgaatttgttttaaaatatttagtttttttgatgaagattattttaagaaagtgaaaatattt

SEQ ID NO: 847 - DNA, 120 bp, synthetic construct
  source 1..120: mol_type = other DNA
cataaatcacatatctaaaaaaaaacactaataaaaaataaactccaacatcacgcataatattaccctaaaatactcaatctttctaataaaaattaccttaaaaaaataaaaatactt

SEQ ID NO: 848 - DNA, 120 bp, synthetic construct
  source 1..120: mol_type = other DNA
tatggattatatatttagaaagaaatattggtgaggagtaagttttaatattacgtatgatgttgttttaaaatatttagtttttttgatgaagattattttaagaaagtgaaaatattt

SEQ ID NO: 849 - DNA, 120 bp, synthetic construct
  source 1..120: mol_type = other DNA
aaaaaaataatctactctcaataacaaaatatcaatacattatttactaatcaatttaacaaaaccaatataaaatctacctaaaaaaaattataaaatctaataacattacacaatatt

SEQ ID NO: 850 - DNA, 120 bp, synthetic construct
  source 1..120: mol_type = other DNA
agagaaatagtttatttttagtagtaaaatattaatatattatttattaattaatttaataagattgatgtaagatttgtttgaaggaaattataaaatttaatgatattatataatatt

SEQ ID NO: 851 - DNA, 120 bp, synthetic construct
  source 1..120: mol_type = other DNA
aaaaaaataatctactctcaataacaaaatatcaatacattatttactaatcaatttaacttaaccaatataaaatctacctaaaaaaaattataaaatctaataacattacacaatatt

SEQ ID NO: 852 - DNA, 120 bp, synthetic construct
  source 1..120: mol_type = other DNA
agagaaatagtttatttttagtagtaaaatattaatatattatttattaattaatttaatttgattgatgtaagatttgtttgaaggaaattataaaatttaatgatattatataatatt

SEQ ID NO: 853 - DNA, 120 bp, synthetic construct
  source 1..120: mol_type = other DNA
aaaaaaataatctactctcaataacaaaatatcaatacattatttactaatcaatttaacaaaaccgatataaaatctacctaaaaaaaattataaaatctaataacattacacaatatt

SEQ ID NO: 854 - DNA, 120 bp, synthetic construct
  source 1..120: mol_type = other DNA
agagaaatagtttatttttagtagtaaaatattaatatattatttattaattaatttaataagatcgatgtaagatttgtttgaaggaaattataaaatttaatgatattatataatatt

SEQ ID NO: 855 - DNA, 120 bp, synthetic construct
  source 1..120: mol_type = other DNA
aaaaaaataatctactctcaataacaaaatatcaatacattatttactaatcaatttaacttaaccgatataaaatctacctaaaaaaaattataaaatctaataacattacacaatatt

SEQ ID NO: 856 - DNA, 120 bp, synthetic construct
  source 1..120: mol_type = other DNA
agagaaatagtttatttttagtagtaaaatattaatatattatttattaattaatttaatttgatcgatgtaagatttgtttgaaggaaattataaaatttaatgatattatataatatt

SEQ ID NO: 857 - DNA, 120 bp, synthetic construct
  source 1..120: mol_type = other DNA
aacttttttctccaccatcctaacatataacttctattctcaaaattcttccctacaaaatcaatatatttcacccacccaaatccacaaaaaaataattaaaaaaataaacaaatattt

SEQ ID NO: 858 - DNA, 120 bp, synthetic construct
  source 1..120: mol_type = other DNA
aatttttttttttattattttaatatatgatttttatttttaaagtttttttttgtagaattgatgtgttttatttatttaggtttatagagaaatggttaggaaagtggataggtattt

SEQ ID NO: 859 - DNA, 120 bp, synthetic construct
  source 1..120: mol_type = other DNA
aacttttttctccaccatcctaacatataacttctattctcaaaattcttccctacaaaaaaaatatatttcacccacccaaatccacaaaaaaataattaaaaaaataaacaaatattt

SEQ ID NO: 860 - DNA, 120 bp, synthetic construct
  source 1..120: mol_type = other DNA
aatttttttttttattattttaatatatgatttttatttttaaagtttttttttgtagaaaagatgtgttttatttatttaggtttatagagaaatggttaggaaagtggataggtattt

SEQ ID NO: 861 - DNA, 120 bp, synthetic construct
  source 1..120: mol_type = other DNA
aacttttttctccaccatcctaacatataacttctattctcaaaattcttccctacaaaatcgatatatttcacccacccaaatccacaaaaaaataattaaaaaaataaacaaatattt

SEQ ID NO: 862 - DNA, 120 bp, synthetic construct
  source 1..120: mol_type = other DNA
aatttttttttttattattttaatatatgatttttatttttaaagtttttttttgtagaatcgatgtgttttatttatttaggtttatagagaaatggttaggaaagtggataggtattt

SEQ ID NO: 863 - DNA, 120 bp, synthetic construct; identical to SEQ ID NO: 859
  source 1..120: mol_type = other DNA

SEQ ID NO: 864 - DNA, 120 bp, synthetic construct; identical to SEQ ID NO: 860
  source 1..120: mol_type = other DNA

SEQ ID NO: 865 - DNA, 120 bp, synthetic construct
  source 1..120: mol_type = other DNA
ctcatcaattaaaattacataataataaccctacaattctataattttaacaataatactctccctacaaaacctctaaacattaccctaattaaaaactccttatatctactttacccc

SEQ ID NO: 866 - DNA, 120 bp, synthetic construct
  source 1..120: mol_type = other DNA
tttattagttagagttgtatggtggtggttttatagttttgtggttttggtagtggtgttttttttatagaatttttgggtattgttttagttggggattttttgtgtttgttttgtttt

SEQ ID NO: 867 - DNA, 120 bp, synthetic construct
  source 1..120: mol_type = other DNA
ctcatcaattaaaattacataataataaccctacaattctataattttaacaataatactaaccctacaaaacctctaaacattaccctaattaaaaactccttatatctactttacccc

SEQ ID NO: 868 - DNA, 120 bp, synthetic construct
  source 1..120: mol_type = other DNA
tttattagttagagttgtatggtggtggttttatagttttgtggttttggtagtggtgttgattttatagaatttttgggtattgttttagttggggattttttgtgtttgttttgtttt

SEQ ID NO: 869 - DNA, 120 bp, synthetic construct; identical to SEQ ID NO: 865
  source 1..120: mol_type = other DNA

SEQ ID NO: 870 - DNA, 120 bp, synthetic construct; identical to SEQ ID NO: 866
  source 1..120: mol_type = other DNA

SEQ ID NO: 871 - DNA, 120 bp, synthetic construct; identical to SEQ ID NO: 867
  source 1..120: mol_type = other DNA

SEQ ID NO: 872 - DNA, 120 bp, synthetic construct; identical to SEQ ID NO: 868
  source 1..120: mol_type = other DNA

SEQ ID NO: 873 - DNA, 120 bp, synthetic construct
  source 1..120: mol_type = other DNA
aatatcaaaataataattaacaaaccaatcaaaaaatacatcaacattaataataaccaaattacactaaaataactacttattatcaaacactctactaaacaccttaaacatatttaa

SEQ ID NO: 874 - DNA, 120 bp, synthetic construct
  source 1..120: mol_type = other DNA
agtattaggataataattgataagttaattagaaagtgtattagtattgataatgattaagttgtattagagtagttatttgttattaagtattttattaagtattttaggtatatttaa

SEQ ID NO: 875 - DNA, 120 bp, synthetic construct
  source 1..120: mol_type = other DNA
aatatcaaaataataattaacaaaccaatcaaaaaatacatcaacattaataataaccaatatacactaaaataactacttattatcaaacactctactaaacaccttaaacatatttaa

SEQ ID NO: 876 - DNA, 120 bp, synthetic construct
  source 1..120: mol_type = other DNA
agtattaggataataattgataagttaattagaaagtgtattagtattgataatgattaatgtgtattagagtagttatttgttattaagtattttattaagtattttaggtatatttaa

SEQ ID NO: 877 - DNA, 120 bp, synthetic construct; identical to SEQ ID NO: 873
  source 1..120: mol_type = other DNA

SEQ ID NO: 878 - DNA, 120 bp, synthetic construct; identical to SEQ ID NO: 874
  source 1..120: mol_type = other DNA

SEQ ID NO: 879 - DNA, 120 bp, synthetic construct; identical to SEQ ID NO: 875
  source 1..120: mol_type = other DNA

SEQ ID NO: 880 - DNA, 120 bp, synthetic construct; identical to SEQ ID NO: 876
  source 1..120: mol_type = other DNA

SEQ ID NO: 881 - DNA, 120 bp, synthetic construct
  source 1..120: mol_type = other DNA
atacctatttaaaaccttttcctcttaaatccaataaaattacttaattaaaataacaaaacattccctcttctaaatttattcatttatttattttttcactaaaaattcttccctaac

SEQ ID NO: 882 - DNA, 120 bp, synthetic construct
  source 1..120: mol_type = other DNA
atgtttgtttgaagttttttttttttgggtttaatggagttatttggttgaggtagtaaaatatttttttttttgggtttgtttgtttgtttgtttttttattgagagtttttttttgat

SEQ ID NO: 883 - DNA, 120 bp, synthetic construct
  source 1..120: mol_type = other DNA
atacctatttaaaaccttttcctcttaaatccaataaaattacttaattaaaataacaaataattccctcttctaaatttattcatttatttattttttcactaaaaattcttccctaac

SEQ ID NO: 884 - DNA, 120 bp, synthetic construct
  source 1..120: mol_type = other DNA
atgtttgtttgaagttttttttttttgggtttaatggagttatttggttgaggtagtaaataatttttttttttgggtttgtttgtttgtttgtttttttattgagagtttttttttgat

SEQ ID NO: 885 - DNA, 120 bp, synthetic construct
  source 1..120: mol_type = other DNA
atacctatttaaaaccttttcctcttaaatccaataaaattacttaattaaaataacaaaacattccctcttctaaatttattcgtttatttattttttcactaaaaattcttccctaac

SEQ ID NO: 886 - DNA, 120 bp, synthetic construct
  source 1..120: mol_type = other DNA
atgtttgtttgaagttttttttttttgggtttaatggagttatttggttgaggtagtaaaatatttttttttttgggtttgttcgtttgtttgtttttttattgagagtttttttttgat

SEQ ID NO: 887 - DNA, 120 bp, synthetic construct
  source 1..120: mol_type = other DNA
atacctatttaaaaccttttcctcttaaatccaataaaattacttaattaaaataacaaataattccctcttctaaatttattcgtttatttattttttcactaaaaattcttccctaac

SEQ ID NO: 888 - DNA, 120 bp, synthetic construct
  source 1..120: mol_type = other DNA
atgtttgtttgaagttttttttttttgggtttaatggagttatttggttgaggtagtaaataatttttttttttgggtttgttcgtttgtttgtttttttattgagagtttttttttgat

SEQ ID NO: 889 - DNA, 120 bp, synthetic construct
  source 1..120: mol_type = other DNA
aaaaaaaaaataattttcctatattttcccttataaaaaaataaaaacactactatctattttcaaacaaaaaataaacccctcatccatatcttcaaactctttaaatacaaaaaaacc

SEQ ID NO: 890 - DNA, 120 bp, synthetic construct
  source 1..120: mol_type = other DNA
gaaaaggaaataatttttttgtatttttttttataggaagataggaatgttgttgtttatttttagataagaaataagttttttatttatgtttttaagttttttggatatagaaaggtt

SEQ ID NO: 891 - DNA, 120 bp, synthetic construct
  source 1..120: mol_type = other DNA
aaaaaaaaaataattttcctatattttcccttataaaaaaataaaaacactactatctataatcaaacaaaaaataaacccctcatccatatcttcaaactctttaaatacaaaaaaacc

SEQ ID NO: 892 - DNA, 120 bp, synthetic construct
  source 1..120: mol_type = other DNA
gaaaaggaaataatttttttgtatttttttttataggaagataggaatgttgttgtttatgattagataagaaataagttttttatttatgtttttaagttttttggatatagaaaggtt

SEQ ID NO: 893 - DNA, 120 bp, synthetic construct
  source 1..120: mol_type = other DNA
aaaaaaaaaataattttcctatattttcccttataaaaaaataaaaacgctactatctattttcaaacaaaaaataaacccctcatccatatcttcaaactctttaaatacaaaaaaacc

SEQ ID NO: 894 - DNA, 120 bp, synthetic construct
  source 1..120: mol_type = other DNA
gaaaaggaaataatttttttgtatttttttttataggaagataggaacgttgttgtttatttttagataagaaataagttttttatttatgtttttaagttttttggatatagaaaggtt

SEQ ID NO: 895 - DNA, 120 bp, synthetic construct
  source 1..120: mol_type = other DNA
aaaaaaaaaataattttcctatattttcccttataaaaaaataaaaacgctactatctataatcaaacaaaaaataaacccctcatccatatcttcaaactctttaaatacaaaaaaacc

SEQ ID NO: 896 - DNA, 120 bp, synthetic construct
  source 1..120: mol_type = other DNA
gaaaaggaaataatttttttgtatttttttttataggaagataggaacgttgttgtttatgattagataagaaataagttttttatttatgtttttaagttttttggatatagaaaggtt

SEQ ID NO: 897 - DNA, 120 bp, synthetic construct
  source 1..120: mol_type = other DNA
tttattctaaaatataatattaaacatttttataattattttattaaaaaccttccaaacctaatacacttaaaaaccccaattacaaatcatcacaaatatttccacaaaataccaata

SEQ ID NO: 898 - DNA, 120 bp, synthetic construct
  source 1..120: mol_type = other DNA
tttgttttagaatatgatgttaggtatttttgtaattattttattgagagttttttaagtttggtatatttagggattttaattgtaagttattataggtgtttttataaggtgttaatg

SEQ ID NO: 899 - DNA, 120 bp, synthetic construct
  source 1..120: mol_type = other DNA
tttattctaaaatataatattaaacatttttataattattttattaaaaaccttccaatcctattacacttaaaaaccccaattacaaatcatcacaaatatttccacaaaataccaata

SEQ ID NO: 900 - DNA, 120 bp, synthetic construct
  source 1..120: mol_type = other DNA
tttgttttagaatatgatgttaggtatttttgtaattattttattgagagttttttaattttgttatatttagggattttaattgtaagttattataggtgtttttataaggtgttaatg

SEQ ID NO: 901 - DNA, 120 bp, synthetic construct; identical to SEQ ID NO: 897
  source 1..120: mol_type = other DNA

SEQ ID NO: 902 - DNA, 120 bp, synthetic construct; identical to SEQ ID NO: 898
  source 1..120: mol_type = other DNA

SEQ ID NO: 903 - DNA, 120 bp, synthetic construct; identical to SEQ ID NO: 899
  source 1..120: mol_type = other DNA

SEQ ID NO: 904 - DNA, 120 bp, synthetic construct; identical to SEQ ID NO: 900
  source 1..120: mol_type = other DNA

SEQ ID NO: 905 - DNA, 120 bp, synthetic construct
  source 1..120: mol_type = other DNA
tatatataaatatctcctccttacattcatcaaataacataataaatcattccaattaaattacaaaactctaaacacttctaaacactactatccccattaaaatacttctctaacatc

SEQ ID NO: 906 - DNA, 120 bp, synthetic construct
  source 1..120: mol_type = other DNA
tgtatatgagtattttttttttgtatttattaggtagtatgataagttattttaattggattatggaattttgggtatttttgggtattgttatttttattagggtgtttttttggtatt

SEQ ID NO: 907 - DNA, 120 bp, synthetic construct
  source 1..120: mol_type = other DNA
tatatataaatatctcctccttacattcatcaaataacataataaatcattccaattatattaaaaaactctaaacacttctaaacactactatccccattaaaatacttctctaacatc

SEQ ID NO: 908 - DNA, 120 bp, synthetic construct
  source 1..120: mol_type = other DNA
tgtatatgagtattttttttttgtatttattaggtagtatgataagttattttaattgtattagggaattttgggtatttttgggtattgttatttttattagggtgtttttttggtatt

SEQ ID NO: 909 - DNA, 120 bp, synthetic construct
  source 1..120: mol_type = other DNA
tatatataaatatctcctccttacattcatcaaataacataataaatcattccaattaaattacgaaactctaaacacttctaaacactactatccccattaaaatacttctctaacatc

SEQ ID NO: 910 - DNA, 120 bp, synthetic construct
  source 1..120: mol_type = other DNA
tgtatatgagtattttttttttgtatttattaggtagtatgataagttattttaattggattacggaattttgggtatttttgggtattgttatttttattagggtgtttttttggtatt

SEQ ID NO: 911 - DNA, 120 bp, synthetic construct; identical to SEQ ID NO: 907
  source 1..120: mol_type = other DNA

SEQ ID NO: 912 - DNA, 120 bp, synthetic construct; identical to SEQ ID NO: 908
  source 1..120: mol_type = other DNA

SEQ ID NO: 913 - DNA, 120 bp, synthetic construct
  source 1..120: mol_type = other DNA
attttcatcataaaacaataaaacttcttccattttaaatataaaattaaaccctatataaaacaaaatcttattacatattataactaacaaaaaataaaaaaaattatcaaccctcct

SEQ ID NO: 914 - DNA, 120 bp, synthetic construct
  source 1..120: mol_type = other DNA
atttttattataagatggtagagttttttttattttaaatgtggaattagattttgtgtgaaatagaattttattatatattatgattagtaggaaataaaggaaattattaattttttt

SEQ ID NO: 915 - DNA, 120 bp, synthetic construct
  source 1..120: mol_type = other DNA
attttcatcataaaacaataaaacttcttccattttaaatataaaattaaaccctataaaaaaaaaaatcttattacatattataactaacaaaaaataaaaaaaattatcaaccctcct

SEQ ID NO: 916 - DNA, 120 bp, synthetic construct
  source 1..120: mol_type = other DNA
atttttattataagatggtagagttttttttattttaaatgtggaattagattttgtgagaaaaagaattttattatatattatgattagtaggaaataaaggaaattattaattttttt

SEQ ID NO: 917 - DNA, 120 bp, synthetic construct
  source 1..120: mol_type = other DNA
attttcatcataaaacgataaaacttcttccattttaaatataaaattaaaccctatataaaacaaaatcttattacatattataactaacaaaaaataaaaaaaattatcaaccctcct

SEQ ID NO: 918 - DNA, 120 bp, synthetic construct
  source 1..120: mol_type = other DNA
atttttattataagacggtagagttttttttattttaaatgtggaattagattttgtgtgaaatagaattttattatatattatgattagtaggaaataaaggaaattattaattttttt

SEQ ID NO: 919 - DNA, 120 bp, synthetic construct
  source 1..120: mol_type = other DNA
attttcatcataaaacgataaaacttcttccattttaaatataaaattaaaccctataaaaaaaaaaatcttattacatattataactaacaaaaaataaaaaaaattatcaaccctcct

SEQ ID NO: 920 - DNA, 120 bp, synthetic construct
  source 1..120: mol_type = other DNA
atttttattataagacggtagagttttttttattttaaatgtggaattagattttgtgagaaaaagaattttattatatattatgattagtaggaaataaaggaaattattaattttttt

SEQ ID NO: 921 - DNA, 120 bp, synthetic construct
  source 1..120: mol_type = other DNA
aaataacacactataaaactactccattaataaataccctccaaataataaatacaaaaaaaatactattcttttaaaaaaacaaaaaaacctacaacaatataactatattataccatc

SEQ ID NO: 922 - DNA, 120 bp, synthetic construct
  source 1..120: mol_type = other DNA
aaatagtatattataaaattattttattggtgagtgttttttaaatggtagatgtaaaggagatgttgtttttttaaagggataagagagtttgtggtaatatgattgtattatgttatt

SEQ ID NO: 923 - DNA, 120 bp, synthetic construct
  source 1..120: mol_type = other DNA
aaataacacactataaaactactccattaataaataccctccaaataataaataccaaaaaaataatattcttttaaaaaaacaaaaaaacctacaacaatataactatattataccatc

SEQ ID NO: 924 - DNA, 120 bp, synthetic construct
  source 1..120: mol_type = other DNA
aaatagtatattataaaattattttattggtgagtgttttttaaatggtagatgttaaggagatggtgtttttttaaagggataagagagtttgtggtaatatgattgtattatgttatt

SEQ ID NO: 925 - DNA, 120 bp, synthetic construct
  source 1..120: mol_type = other DNA
aaataacacactataaaactactccattaataaataccctccaaataataaatacaaaaaaaatactattcttttaaaaaaacaaaaaaacctacgacaatataactatattataccatc

SEQ ID NO: 926 - DNA, 120 bp, synthetic construct
  source 1..120: mol_type = other DNA
aaatagtatattataaaattattttattggtgagtgttttttaaatggtagatgtaaaggagatgttgtttttttaaagggataagagagtttgcggtaatatgattgtattatgttatt

SEQ ID NO: 927 - DNA, 120 bp, synthetic construct
  source 1..120: mol_type = other DNA
aaataacacactataaaactactccattaataaataccctccaaataataaataccaaaaaaataatattcttttaaaaaaacaaaaaaacctacgacaatataactatattataccatc

SEQ ID NO: 928 - DNA, 120 bp, synthetic construct
  source 1..120: mol_type = other DNA
aaatagtatattataaaattattttattggtgagtgttttttaaatggtagatgttaaggagatggtgtttttttaaagggataagagagtttgcggtaatatgattgtattatgttatt

SEQ ID NO: 929 - DNA, 120 bp, synthetic construct
  source 1..120: mol_type = other DNA
tccaaaacaacatctccctacaacattactatctcctcaatactccaaataaatttcctaatacaaattccattaattaaaactacatttaatatttacataaactacattttcactcct

SEQ ID NO: 930 - DNA, 120 bp, synthetic construct
  source 1..120: mol_type = other DNA
tttaggatagtatttttttgtagtattgttatttttttagtgttttaggtagattttttggtgtagattttattggttaagattgtatttgatatttatataaattatgtttttattttt

SEQ ID NO: 931 - DNA, 120 bp, synthetic construct
  source 1..120: mol_type = other DNA
tccaaaacaacatctccctacaacattactatctcctcaatactccaaataaatttcctcatccaaattccattaattaaaactacatttaatatttacataaactacattttcactcct

SEQ ID NO: 932 - DNA, 120 bp, synthetic construct
  source 1..120: mol_type = other DNA
tttaggatagtatttttttgtagtattgttatttttttagtgttttaggtagatttttttgtttagattttattggttaagattgtatttgatatttatataaattatgtttttattttt

SEQ ID NO: 933 - DNA, 120 bp, synthetic construct
  source 1..120: mol_type = other DNA
tccaaaacaacatctccctacaacattactatctcctcaatactccaaataaatttcctaatacaaattccattaattaaaactacatttaatatttacataaactacgttttcactcct

SEQ ID NO: 934 - DNA, 120 bp, synthetic construct
  source 1..120: mol_type = other DNA
tttaggatagtatttttttgtagtattgttatttttttagtgttttaggtagattttttggtgtagattttattggttaagattgtatttgatatttatataaattacgtttttattttt

SEQ ID NO: 935 - DNA, 120 bp, synthetic construct
  source 1..120: mol_type = other DNA
tccaaaacaacatctccctacaacattactatctcctcaatactccaaataaatttcctcgtccaaattccattaattaaaactacatttaatatttacataaactacgttttcactcct

SEQ ID NO: 936 - DNA, 120 bp, synthetic construct
  source 1..120: mol_type = other DNA
tttaggatagtatttttttgtagtattgttatttttttagtgttttaggtagattttttcgtttagattttattggttaagattgtatttgatatttatataaattacgtttttattttt

SEQ ID NO: 937 - DNA, 120 bp, synthetic construct
  source 1..120: mol_type = other DNA
aacaatacaaatacaaatcatttaacttaaacttaaattaaaaataaaaaaacatcttaacctaaccttaaaaaatcttacattttaaaattttaaatacattattctatacaataaatt

SEQ ID NO: 938 - DNA, 120 bp, synthetic construct
  source 1..120: mol_type = other DNA
gataatgtaagtgtaggttatttaatttgagtttgaattaaaaataaagggatattttaatttagttttagaagattttatattttgaaattttgaatatattattttatataataaatt

SEQ ID NO: 939 - DNA, 120 bp, synthetic construct
  source 1..120: mol_type = other DNA
aacaatacaaatacaaatcatttaacttaaacttaaattaaaaataaaaaaacatcttacccaaaccttaaaaaatcttacattttaaaattttaaatacattattctatacaataaatt

SEQ ID NO: 940 - DNA, 120 bp, synthetic construct
  source 1..120: mol_type = other DNA
gataatgtaagtgtaggttatttaatttgagtttgaattaaaaataaagggatattttatttaagttttagaagattttatattttgaaattttgaatatattattttatataataaatt

SEQ ID NO: 941 - DNA, 120 bp, synthetic construct; identical to SEQ ID NO: 937
  source 1..120: mol_type = other DNA

SEQ ID NO: 942 - DNA, 120 bp, synthetic construct; identical to SEQ ID NO: 938
  source 1..120: mol_type = other DNA

SEQ ID NO: 943 - DNA, 120 bp, synthetic construct; identical to SEQ ID NO: 939
  source 1..120: mol_type = other DNA

SEQ ID NO: 944 - DNA, 120 bp, synthetic construct; identical to SEQ ID NO: 940
  source 1..120: mol_type = other DNA

SEQ ID NO: 945 - DNA, 120 bp, synthetic construct
  source 1..120: mol_type = other DNA
cctctacccccactcccccacataccccccaaacaacacatcacactacaccacactattaaatcaataacttattaataaaccctcatatacactacctaaaaccaaaaaacattatat

SEQ ID NO: 946 - DNA, 120 bp, synthetic construct
  source 1..120: mol_type = other DNA
tttttgtttttatttttttatatgttttttgaataatatattgtattgtattatattgttgagttaatggtttgttggtaaatttttatatgtattgtttggggttagggaatattgtat

SEQ ID NO: 947 - DNA, 120 bp, synthetic construct
  source 1..120: mol_type = other DNA
cctctacccccactcccccacataccccccaaacaacacatcacactacaccacactcttaaataaataacttattaataaaccctcatatacactacctaaaaccaaaaaacattatat

SEQ ID NO: 948 - DNA, 120 bp, synthetic construct
  source 1..120: mol_type = other DNA
tttttgtttttatttttttatatgttttttgaataatatattgtattgtattatatttttgagtgaatggtttgttggtaaatttttatatgtattgtttggggttagggaatattgtat

SEQ ID NO: 949 - DNA, 120 bp, synthetic construct
  source 1..120: mol_type = other DNA
cctctacccccactcccccacataccccccgaacaacacatcgcactacaccacactattaaatcaataacttattaataaaccctcatatacactacctaaaaccaaaaaacattatat

SEQ ID NO: 950 - DNA, 120 bp, synthetic construct
  source 1..120: mol_type = other DNA
tttttgtttttatttttttatatgtttttcgaataatatatcgtattgtattatattgttgagttaatggtttgttggtaaatttttatatgtattgtttggggttagggaatattgtat

SEQ ID NO: 951 - DNA, 120 bp, synthetic construct
  source 1..120: mol_type = other DNA
cctctacccccactcccccacataccccccgaacaacacatcgcactacaccacactcttaaataaataacttattaataaaccctcatatacactacctaaaaccaaaaaacattatat

SEQ ID NO: 952 - DNA, 120 bp, synthetic construct
  source 1..120: mol_type = other DNA
tttttgtttttatttttttatatgtttttcgaataatatatcgtattgtattatatttttgagtgaatggtttgttggtaaatttttatatgtattgtttggggttagggaatattgtat

SEQ ID NO: 953 - DNA, 120 bp, synthetic construct
  source 1..120: mol_type = other DNA
acatctaaaatataaaatcaaaaaaacaacctatctaaatatcttaaaaatactacattaaaaaaatctccaaattaaaaatataaataatttttataattttataaaaaatcctaatta

SEQ ID NO: 954 - DNA, 120 bp, synthetic construct
  source 1..120: mol_type = other DNA
atatttgaaatgtaaaattagaaaaataatttatttaaatgttttggaagtattgtattgaaaaaatttttagattaaaaatataggtaatttttataattttgtagggaattttagtta

SEQ ID NO: 955 - DNA, 120 bp, synthetic construct
  source 1..120: mol_type = other DNA
acatctaaaatataaaatcaaaaaaacaacctatctaaatatcttaaaaatactacatttaacaaatctccaaattaaaaatataaataatttttataattttataaaaaatcctaatta

SEQ ID NO: 956 - DNA, 120 bp, synthetic construct
  source 1..120: mol_type = other DNA
atatttgaaatgtaaaattagaaaaataatttatttaaatgttttggaagtattgtatttaataaatttttagattaaaaatataggtaatttttataattttgtagggaattttagtta

SEQ ID NO: 957 - DNA, 120 bp, synthetic construct; identical to SEQ ID NO: 953
  source 1..120: mol_type = other DNA

SEQ ID NO: 958 - DNA, 120 bp, synthetic construct; identical to SEQ ID NO: 954
  source 1..120: mol_type = other DNA

SEQ ID NO: 959 - DNA, 120 bp, synthetic construct; identical to SEQ ID NO: 955
  source 1..120: mol_type = other DNA

SEQ ID NO: 960 - DNA, 120 bp, synthetic construct; identical to SEQ ID NO: 956
  source 1..120: mol_type = other DNA

SEQ ID NO: 961 - DNA, 120 bp, synthetic construct
  source 1..120: mol_type = other DNA
caaatattttaactaaactaaacttctcacaaaaaaaaactaaacttttactctataaaaccactataatttaacaaaaacaaaaataaaaaatcttatttattacaataactaatatta

SEQ ID NO: 962 - DNA, 120 bp, synthetic construct
  source 1..120: mol_type = other DNA
tagatgttttagttaaattggattttttataaaggagaattgagtttttattttgtaaaattattgtgatttggtgggggtgagggtggggggttttgtttgttatagtggttagtgtta

SEQ ID NO: 963 - DNA, 120 bp, synthetic construct
  source 1..120: mol_type = other DNA
caaatattttaactaaactaaacttctcacaaaaaaaaactaaacttttactctattaaaccacaataatttaacaaaaacaaaaataaaaaatcttatttattacaataactaatatta

SEQ ID NO: 964 - DNA, 120 bp, synthetic construct
  source 1..120: mol_type = other DNA
tagatgttttagttaaattggattttttataaaggagaattgagtttttattttgttaaattatggtgatttggtgggggtgagggtggggggttttgtttgttatagtggttagtgtta

SEQ ID NO: 965 - DNA, 120 bp, synthetic construct
  source 1..120: mol_type = other DNA
caaatattttaactaaactaaacttctcacaaaaaaaaactaaacttttactctataaaaccactataatttaacgaaaacgaaaataaaaaatcttatttattacaataactaatatta

SEQ ID NO: 966 - DNA, 120 bp, synthetic construct
  source 1..120: mol_type = other DNA
tagatgttttagttaaattggattttttataaaggagaattgagtttttattttgtaaaattattgtgatttggcgggggcgagggtggggggttttgtttgttatagtggttagtgtta

SEQ ID NO: 967 - DNA, 120 bp, synthetic construct
  source 1..120: mol_type = other DNA
caaatattttaactaaactaaacttctcacaaaaaaaaactaaacttttactctattaaaccacgataatttaacgaaaacgaaaataaaaaatcttatttattacaataactaatatta

SEQ ID NO: 968 - DNA, 120 bp, synthetic construct
  source 1..120: mol_type = other DNA
tagatgttttagttaaattggattttttataaaggagaattgagtttttattttgttaaattacggtgatttggcgggggcgagggtggggggttttgtttgttatagtggttagtgtta

SEQ ID NO: 969 - DNA, 120 bp, synthetic construct
  source 1..120: mol_type = other DNA
acacctaacataaaatctaacataaatccaaactaaataacacccctaccttacaaatatataccattatacaaaaaaccaaaactttaaaaaactctatttaactcataatcaacatac

SEQ ID NO: 970 - DNA, 120 bp, synthetic construct
  source 1..120: mol_type = other DNA
atatttggtataaagtttagtatgaatttaggttgggtaatatttttgttttataggtgtatgttattatatagaaagttagggttttaaagagttttgtttaatttatagttagtatgt

SEQ ID NO: 971 - DNA, 120 bp, synthetic construct
  source 1..120: mol_type = other DNA
acacctaacataaaatctaacataaatccaaactaaataacacccctaccttacaattatatacaattatacaaaaaaccaaaactttaaaaaactctatttaactcataatcaacatac

SEQ ID NO: 972 - DNA, 120 bp, synthetic construct
  source 1..120: mol_type = other DNA
atatttggtataaagtttagtatgaatttaggttgggtaatatttttgttttatagttgtatgtaattatatagaaagttagggttttaaagagttttgtttaatttatagttagtatgt

SEQ ID NO: 973 - DNA, 120 bp, synthetic construct; identical to SEQ ID NO: 969
  source 1..120: mol_type = other DNA

SEQ ID NO: 974 - DNA, 120 bp, synthetic construct; identical to SEQ ID NO: 970
  source 1..120: mol_type = other DNA

SEQ ID NO: 975 - DNA, 120 bp, synthetic construct; identical to SEQ ID NO: 971
  source 1..120: mol_type = other DNA

SEQ ID NO: 976 - DNA, 120 bp, synthetic construct; identical to SEQ ID NO: 972
  source 1..120: mol_type = other DNA

SEQ ID NO: 977 - DNA, 120 bp, synthetic construct
  source 1..120: mol_type = other DNA
taaaaatttaaaaatcctattaaccatctaatcccaaaaaaacaaaactaacaacaaatataaccaataaaaacactaataaaaaaaaaaactacctcctattaatatttaaccacctaa

SEQ ID NO: 978 - DNA, 120 bp, synthetic construct
  source 1..120: mol_type = other DNA
tagaaatttagaggttttattggttatttggttttaagagaataaaattagtagtaaatgtggttagtgaaggtgttggtggagagagaggttgttttttgttgatgtttgattatttgg

SEQ ID NO: 979 - DNA, 120 bp, synthetic construct
  source 1..120: mol_type = other DNA
taaaaatttaaaaatcctattaaccatctaatcccaaaaaaacaaaactaacaacatatataacaaataaaaacactaataaaaaaaaaaactacctcctattaatatttaaccacctaa

SEQ ID NO: 980 - DNA, 120 bp, synthetic construct
  source 1..120: mol_type = other DNA
tagaaatttagaggttttattggttatttggttttaagagaataaaattagtagtatatgtggtaagtgaaggtgttggtggagagagaggttgttttttgttgatgtttgattatttgg

SEQ ID NO: 981 - DNA, 120 bp, synthetic construct
  source 1..120: mol_type = other DNA
taaaaatttaaaaatcctattaaccatctaatcccaaaaaaacaaaactaacaacaaatataaccaataaaaacgctaataaaaaaaaaaactacctcctattaatatttaaccacctaa

SEQ ID NO: 982 - DNA, 120 bp, synthetic construct
  source 1..120: mol_type = other DNA
tagaaatttagaggttttattggttatttggttttaagagaataaaattagtagtaaatgtggttagtgaaggcgttggtggagagagaggttgttttttgttgatgtttgattatttgg

SEQ ID NO: 983 - DNA, 120 bp, synthetic construct
  source 1..120: mol_type = other DNA
taaaaatttaaaaatcctattaaccatctaatcccaaaaaaacaaaactaacaacatatataacaaataaaaacgctaataaaaaaaaaaactacctcctattaatatttaaccacctaa

SEQ ID NO: 984 - DNA, 120 bp, synthetic construct
  source 1..120: mol_type = other DNA
tagaaatttagaggttttattggttatttggttttaagagaataaaattagtagtatatgtggtaagtgaaggcgttggtggagagagaggttgttttttgttgatgtttgattatttgg

SEQ ID NO: 985 - DNA, 120 bp, synthetic construct
  source 1..120: mol_type = other DNA
ttaataaataaattaacttcattctttttattaataactattacaaaatcccacaaaataccaaatttataaaacacaaatcacacaattacattatttacctaaaaataatataattac

SEQ ID NO: 986 - DNA, 120 bp, synthetic construct
  source 1..120: mol_type = other DNA
ttaataaatggattgattttattttttttattagtgattattataaggttttatagggtgttagatttgtgaaatatagattatataattatattgtttatttggaaataatgtaattat

SEQ ID NO: 987 - DNA, 120 bp, synthetic construct
  source 1..120: mol_type = other DNA
ttaataaataaattaacttcattctttttattaataactattacaaaatcccacaatataccaaaattataaaacacaaatcacacaattacattatttacctaaaaataatataattac

SEQ ID NO: 988 - DNA, 120 bp, synthetic construct
  source 1..120: mol_type = other DNA
ttaataaatggattgattttattttttttattagtgattattataaggttttatagtgtgttagagttgtgaaatatagattatataattatattgtttatttggaaataatgtaattat

SEQ ID NO: 989 - DNA, 120 bp, synthetic construct; identical to SEQ ID NO: 985
  source 1..120: mol_type = other DNA

SEQ ID NO: 990 - DNA, 120 bp, synthetic construct; identical to SEQ ID NO: 986
  source 1..120: mol_type = other DNA

SEQ ID NO: 991 - DNA, 120 bp, synthetic construct; identical to SEQ ID NO: 987
  source 1..120: mol_type = other DNA

SEQ ID NO: 992 - DNA, 120 bp, synthetic construct; identical to SEQ ID NO: 988
  source 1..120: mol_type = other DNA

SEQ ID NO: 993 - DNA, 120 bp, synthetic construct
  source 1..120: mol_type = other DNA
taaaacaaacttaataaaaaaaatcaaaatacaacaaatcaattaataaaactcccaatctttaataatctacaaaacatatacttacaaccaccacaatccacccattatatcatttaa

SEQ ID NO: 994 - DNA, 120 bp, synthetic construct
  source 1..120: mol_type = other DNA
tggggtaggtttgatgagggagattaaagtgtagtagattggttagtgaagtttttggtttttggtggtttgtaagatatgtatttatggttattataatttatttattgtgttatttag

SEQ ID NO: 995 - DNA, 120 bp, synthetic construct
  source 1..120: mol_type = other DNA
taaaacaaacttaataaaaaaaatcaaaatacaacaaatcaattaataaaactccctatctttaaaaatctacaaaacatatacttacaaccaccacaatccacccattatatcatttaa

SEQ ID NO: 996 - DNA, 120 bp, synthetic construct
  source 1..120: mol_type = other DNA
tggggtaggtttgatgagggagattaaagtgtagtagattggttagtgaagttttttgtttttggaggtttgtaagatatgtatttatggttattataatttatttattgtgttatttag

SEQ ID NO: 997 - DNA, 120 bp, synthetic construct
  source 1..120: mol_type = other DNA
taaaacaaacttaataaaaaaaatcaaaatacaacaaatcgattaataaaactcccgatctttaataatctacaaaacatatacttacgaccaccacaatccacccattatatcatttaa

SEQ ID NO: 998 - DNA, 120 bp, synthetic construct
  source 1..120: mol_type = other DNA
tggggtaggtttgatgagggagattaaagtgtagtagatcggttagtgaagttttcggtttttggtggtttgtaagatatgtatttacggttattataatttatttattgtgttatttag

SEQ ID NO: 999 - DNA, 120 bp, synthetic construct
  source 1..120: mol_type = other DNA
taaaacaaacttaataaaaaaaatcaaaatacaacaaatcgattaataaaactccctatctttaaaaatctacaaaacatatacttacgaccaccacaatccacccattatatcatttaa

SEQ ID NO: 1000 - DNA, 120 bp, synthetic construct
  source 1..120: mol_type = other DNA
tggggtaggtttgatgagggagattaaagtgtagtagatcggttagtgaagttttttgtttttggaggtttgtaagatatgtatttacggttattataatttatttattgtgttatttag

SEQ ID NO: 1001 - DNA, 120 bp, synthetic construct
  source 1..120: mol_type = other DNA
attcttcaaaactcaaaaactataccctttttaaaaatactacaaactaccccaaacaaactaaaaatactcttaactccatactctcaataaaaacaatcaaatatttttaaataaaaa

SEQ ID NO: 1002 - DNA, 120 bp, synthetic construct
  source 1..120: mol_type = other DNA
attttttaaggtttaaaaattatattttttttgaaggtattgtaaattattttagatagattaaagatgtttttgattttatgtttttagtgaaagtagttaagtgtttttgaataaaaa

SEQ ID NO: 1003 - DNA, 120 bp, synthetic construct
  source 1..120: mol_type = other DNA
attcttcaaaactcaaaaactataccctttttaaaaatactacaaactaccccaaactaactaataatactcttaactccatactctcaataaaaacaatcaaatatttttaaataaaaa

SEQ ID NO: 1004 - DNA, 120 bp, synthetic construct
  source 1..120: mol_type = other DNA
attttttaaggtttaaaaattatattttttttgaaggtattgtaaattattttagattgattaatgatgtttttgattttatgtttttagtgaaagtagttaagtgtttttgaataaaaa

SEQ ID NO: 1005 - DNA, 120 bp, synthetic construct; identical to SEQ ID NO: 1001
  source 1..120: mol_type = other DNA

SEQ ID NO: 1006 - DNA, 120 bp, synthetic construct; identical to SEQ ID NO: 1002
  source 1..120: mol_type = other DNA

SEQ ID NO: 1007 - DNA, 120 bp, synthetic construct; identical to SEQ ID NO: 1003
  source 1..120: mol_type = other DNA

SEQ ID NO: 1008 - DNA, 120 bp, synthetic construct; identical to SEQ ID NO: 1004
  source 1..120: mol_type = other DNA

SEQ ID NO: 1009 - DNA, 120 bp, synthetic construct
  source 1..120: mol_type = other DNA
ttctctcatacattctaaacaataccaaactaaaactaaaaatcaaccttcctaactccaaaaaacatatttccaataatatataaaaaaatataaactttttcctttccctttactaaa

SEQ ID NO: 1010 - DNA, 120 bp, synthetic construct
  source 1..120: mol_type = other DNA
tttttttgtgtattttaagtaatgttaggttggaattaaagattagtttttttagttttagggagtgtgtttttagtaatatgtaggaggatgtgaatttttttttttttttttgttggg

SEQ ID NO: 1011 - DNA, 120 bp, synthetic construct
  source 1..120: mol_type = other DNA
ttctctcatacattctaaacaataccaaactaaaactaaaaatcaaccttcctaactacaaaaaccatatttccaataatatataaaaaaatataaactttttcctttccctttactaaa

SEQ ID NO: 1012 - DNA, 120 bp, synthetic construct
  source 1..120: mol_type = other DNA
tttttttgtgtattttaagtaatgttaggttggaattaaagattagtttttttagttgtagggattgtgtttttagtaatatgtaggaggatgtgaatttttttttttttttttgttggg

SEQ ID NO: 1013 - DNA, 120 bp, synthetic construct
  source 1..120: mol_type = other DNA
ttctctcgtacattctaaacaataccaaactaaaactaaaaatcaaccttcctaactccaaaaaacgtatttccaataatatataaaaaaatataaactttttcctttccctttactaaa

SEQ ID NO: 1014 - DNA, 120 bp, synthetic construct
  source 1..120: mol_type = other DNA
ttttttcgtgtattttaagtaatgttaggttggaattaaagattagtttttttagttttagggagcgtgtttttagtaatatgtaggaggatgtgaatttttttttttttttttgttggg

SEQ ID NO: 1015 - DNA, 120 bp, synthetic construct
  source 1..120: mol_type = other DNA
ttctctcgtacattctaaacaataccaaactaaaactaaaaatcaaccttcctaactacaaaaaccgtatttccaataatatataaaaaaatataaactttttcctttccctttactaaa

SEQ ID NO: 1016 - DNA, 120 bp, synthetic construct
  source 1..120: mol_type = other DNA
ttttttcgtgtattttaagtaatgttaggttggaattaaagattagtttttttagttgtagggatcgtgtttttagtaatatgtaggaggatgtgaatttttttttttttttttgttggg

SEQ ID NO: 1017 - DNA, 120 bp, synthetic construct
  source 1..120: mol_type = other DNA
aaacaaaaaattaaaatcaattacataaattcaaacacaaaaaaaaaaaaaaactattaaataaccataatatacatccaaactataactaatcttttaaaatataattttattaaatta

SEQ ID NO: 1018 - DNA, 120 bp, synthetic construct
  source 1..120: mol_type = other DNA
aggtaaagagttgaaattaattatatgagtttaaatataaaaaaagaaagaaattgttaggtaattatagtatgtatttaaattgtgattggttttttaaaatatgattttattaagtta

SEQ ID NO: 1019 - DNA, 120 bp, synthetic construct
  source 1..120: mol_type = other DNA
aaacaaaaaattaaaatcaattacataaattcaaacacaaaaaaaaaaaaaaactaataaataacaataatatacatccaaactataactaatcttttaaaatataattttattaaatta

SEQ ID NO: 1020 - DNA, 120 bp, synthetic construct
  source 1..120: mol_type = other DNA
aggtaaagagttgaaattaattatatgagtttaaatataaaaaaagaaagaaattgataggtaatgatagtatgtatttaaattgtgattggttttttaaaatatgattttattaagtta

SEQ ID NO: 1021 - DNA, 120 bp, synthetic construct; identical to SEQ ID NO: 1017
  source 1..120: mol_type = other DNA

SEQ ID NO: 1022 - DNA, 120 bp, synthetic construct; identical to SEQ ID NO: 1018
  source 1..120: mol_type = other DNA

SEQ ID NO: 1023 - DNA, 120 bp, synthetic construct
  source 1..120: mol_type = other DNA
aaacaaaaaattaaaatcaattacataaattcaaacacaaaaaaaaaaaaaaactaataaataacgataatatacatccaaactataactaatcttttaaaatataattttattaaatta

SEQ ID NO: 1024 - DNA, 120 bp, synthetic construct
  source 1..120: mol_type = other DNA
aggtaaagagttgaaattaattatatgagtttaaatataaaaaaagaaagaaattgataggtaacgatagtatgtatttaaattgtgattggttttttaaaatatgattttattaagtta

SEQ ID NO: 1025 - DNA, 120 bp, synthetic construct
  source 1..120: mol_type = other DNA
atacatacttaaattctctcaattctaaacatataacactattaattattaataaattaacaaaataataacctcaaaattttttaataacaataacctcttataatatacatctatttt

SEQ ID NO: 1026 - DNA, 120 bp, synthetic construct
  source 1..120: mol_type = other DNA
atgtatatttagatttttttagttttgaatatgtaatattgttaattgttgatgggttaataaaataatggttttaggattttttagtaataatgattttttatggtatatatttatttt

SEQ ID NO: 1027 - DNA, 120 bp, synthetic construct
  source 1..120: mol_type = other DNA
atacatacttaaattctctcaattctaaacatataacactattaattattaataaaataacaaaaaaataacctcaaaattttttaataacaataacctcttataatatacatctatttt

SEQ ID NO: 1028 - DNA, 120 bp, synthetic construct
  source 1..120: mol_type = other DNA
atgtatatttagatttttttagttttgaatatgtaatattgttaattgttgatgggataataaaaaaatggttttaggattttttagtaataatgattttttatggtatatatttatttt

SEQ ID NO: 1029 - DNA, 120 bp, synthetic construct; identical to SEQ ID NO: 1025
  source 1..120: mol_type = other DNA

SEQ ID NO: 1030 - DNA, 120 bp, synthetic construct; identical to SEQ ID NO: 1026
  source 1..120: mol_type = other DNA

SEQ ID NO: 1031 - DNA, 120 bp, synthetic construct; identical to SEQ ID NO: 1027
  source 1..120: mol_type = other DNA

SEQ ID NO: 1032 - DNA, 120 bp, synthetic construct; identical to SEQ ID NO: 1028
  source 1..120: mol_type = other DNA

SEQ ID NO: 1033 - DNA, 120 bp, synthetic construct
  source 1..120: mol_type = other DNA
tttataaaataataatttatatccctaacaaaataatcctaaataaaaataactctccctcaacataaaaaaataacaaaacatttataaaaaaaaaacaaaacttcaaataaataaata

SEQ ID NO: 1034 - DNA, 120 bp, synthetic construct
  source 1..120: mol_type = other DNA
tttgtgaggtagtgatttatatttttggtagaataattttgggtgaaagtggtttttttttagtataaaggaatagtaaaatatttatgaaagggagatagagttttagatgagtgggta

SEQ ID NO: 1035 - DNA, 120 bp, synthetic construct
  source 1..120: mol_type = other DNA
tttataaaataataatttatatccctaacaaaataatcctaaataaaaataactctccatcaccataaaaaaataacaaaacatttataaaaaaaaaacaaaacttcaaataaataaata

SEQ ID NO: 1036 - DNA, 120 bp, synthetic construct
  source 1..120: mol_type = other DNA
tttgtgaggtagtgatttatatttttggtagaataattttgggtgaaagtggttttttgttattataaaggaatagtaaaatatttatgaaagggagatagagttttagatgagtgggta

SEQ ID NO: 1037 - DNA, 120 bp, synthetic construct; identical to SEQ ID NO: 1033
  source 1..120: mol_type = other DNA

SEQ ID NO: 1038 - DNA, 120 bp, synthetic construct; identical to SEQ ID NO: 1034
  source 1..120: mol_type = other DNA

SEQ ID NO: 1039 - DNA, 120 bp, synthetic construct
  source 1..120: mol_type = other DNA
tttataaaataataatttatatccctaacaaaataatcctaaataaaaataactctccgtcaccataaaaaaataacaaaacatttataaaaaaaaaacaaaacttcaaataaataaata

SEQ ID NO: 1040 - DNA, 120 bp, synthetic construct
  source 1..120: mol_type = other DNA
tttgtgaggtagtgatttatatttttggtagaataattttgggtgaaagtggtttttcgttattataaaggaatagtaaaatatttatgaaagggagatagagttttagatgagtgggta

SEQ ID NO: 1041 - DNA, 120 bp, synthetic construct
  source 1..120: mol_type = other DNA
tacacttttactaaaaactacccttttaacttaaaatttccaaccaaaaacaactaaattcaccaaaaaacaaaattttaacaaatacacattaaaataaaaaactaacttccctccaaa

SEQ ID NO: 1042 - DNA, 120 bp, synthetic construct
  source 1..120: mol_type = other DNA
tatgtttttgttagaagttgtttttttggtttgggatttttagttaggaataattggatttattgaggggtaggattttggtaaatgtatattggggtggaaggttggtttttttttagg

SEQ ID NO: 1043 - DNA, 120 bp, synthetic construct
  source 1..120: mol_type = other DNA
tacacttttactaaaaactacccttttaacttaaaatttccaaccaaaaacaactaaataccccaaaaaacaaaattttaacaaatacacattaaaataaaaaactaacttccctccaaa

SEQ ID NO: 1044 - DNA, 120 bp, synthetic construct
  source 1..120: mol_type = other DNA
tatgtttttgttagaagttgtttttttggtttgggatttttagttaggaataattggatattttgaggggtaggattttggtaaatgtatattggggtggaaggttggtttttttttagg

SEQ ID NO: 1045 - DNA, 120 bp, synthetic construct
  source 1..120: mol_type = other DNA
tacgcttttactaaaaactacccttttaacttaaaatttccaaccaaaaacaactaaattcaccgaaaaacaaaattttaacaaatacacattaaaataaaaaactaacttccctccaaa

SEQ ID NO: 1046 - DNA, 120 bp, synthetic construct
  source 1..120: mol_type = other DNA
tacgtttttgttagaagttgtttttttggtttgggatttttagttaggaataattggatttatcgaggggtaggattttggtaaatgtatattggggtggaaggttggtttttttttagg

SEQ ID NO: 1047 - DNA, 120 bp, synthetic construct
  source 1..120: mol_type = other DNA
tacgcttttactaaaaactacccttttaacttaaaatttccaaccaaaaacaactaaataccccgaaaaacaaaattttaacaaatacacattaaaataaaaaactaacttccctccaaa

SEQ ID NO: 1048 - DNA, 120 bp, synthetic construct
  source 1..120: mol_type = other DNA
tacgtttttgttagaagttgtttttttggtttgggatttttagttaggaataattggatatttcgaggggtaggattttggtaaatgtatattggggtggaaggttggtttttttttagg

SEQ ID NO: 1049 - DNA, 120 bp, synthetic construct
  source 1..120: mol_type = other DNA
aaaattacctaaattaactcccatatttaaaaatattataaatccctacccaaaaaaaacactcaataatccattacaaaaaactaaaaaaaaaaaccaaaaaatataaataactaaaat

SEQ ID NO: 1050 - DNA, 120 bp, synthetic construct
  source 1..120: mol_type = other DNA
gggattgtttgggttggtttttatgtttggagatattgtaggtttttgtttaagagggatatttggtgatttattgtaagaggttgaagggaaaggttaaggggtatgggtggttgggat

SEQ ID NO: 1051 - DNA, 120 bp, synthetic construct
  source 1..120: mol_type = other DNA
aaaattacctaaattaactcccatatttaaaaatattataaatccctacccaaaaaaaaaaatcaataatccattacaaaaaactaaaaaaaaaaaccaaaaaatataaataactaaaat

SEQ ID NO: 1052 - DNA, 120 bp, synthetic construct
  source 1..120: mol_type = other DNA
gggattgtttgggttggtttttatgtttggagatattgtaggtttttgtttaagagggagagttggtgatttattgtaagaggttgaagggaaaggttaaggggtatgggtggttgggat

SEQ ID NO: 1053 - DNA, 120 bp, synthetic construct
  source 1..120: mol_type = other DNA
aaaattacctaaattaactcccatatttaaaaatattataaatccctacccaaaaaaaacactcgataatccattacaaaaaactaaaaaaaaaaaccaaaaaatataaataactaaaat

SEQ ID NO: 1054 - DNA, 120 bp, synthetic construct
  source 1..120: mol_type = other DNA
gggattgtttgggttggtttttatgtttggagatattgtaggtttttgtttaagagggatattcggtgatttattgtaagaggttgaagggaaaggttaaggggtatgggtggttgggat

SEQ ID NO: 1055 - DNA, 120 bp, synthetic construct
  source 1..120: mol_type = other DNA
aaaattacctaaattaactcccatatttaaaaatattataaatccctacccaaaaaaaaaaatcgataatccattacaaaaaactaaaaaaaaaaaccaaaaaatataaataactaaaat

SEQ ID NO: 1056 - DNA, 120 bp, synthetic construct
  source 1..120: mol_type = other DNA
gggattgtttgggttggtttttatgtttggagatattgtaggtttttgtttaagagggagagtcggtgatttattgtaagaggttgaagggaaaggttaaggggtatgggtggttgggat

SEQ ID NO: 1057 - DNA, 120 bp, synthetic construct
  source 1..120: mol_type = other DNA
aatacaataatacatttaattatccaaaacattctacctaccctacacttaaatccttcaataaaaaatactcccaaatacttatctctctataaaactaccatactttatactacataa

SEQ ID NO: 1058 - DNA, 120 bp, synthetic construct
  source 1..120: mol_type = other DNA
aatataatagtgtatttggttatttaggatattttgtttgttttgtatttaggttttttggtggaaagtgtttttagatgtttatttttttataaagttgttatgttttgtgttgtgtga

SEQ ID NO: 1059 - DNA, 120 bp, synthetic construct
  source 1..120: mol_type = other DNA
aatacaataatacatttaattatccaaaacattctacctaccctacacttaaatccttctaaaaaaaatactcccaaatacttatctctctataaaactaccatactttatactacataa

SEQ ID NO: 1060 - DNA, 120 bp, synthetic construct
  source 1..120: mol_type = other DNA
aatataatagtgtatttggttatttaggatattttgtttgttttgtatttaggtttttttggggaaagtgtttttagatgtttatttttttataaagttgttatgttttgtgttgtgtga

SEQ ID NO: 1061 - DNA, 120 bp, synthetic construct
  source 1..120: mol_type = other DNA
aatacaataatacatttaattatccaaaacattctacctaccctacacttaaatccttcgataaaaaatactcccaaatacttatctctctataaaactaccatactttatactacgtaa

SEQ ID NO: 1062 - DNA, 120 bp, synthetic construct
  source 1..120: mol_type = other DNA
aatataatagtgtatttggttatttaggatattttgtttgttttgtatttaggtttttcggtggaaagtgtttttagatgtttatttttttataaagttgttatgttttgtgttgcgtga

SEQ ID NO: 1063 - DNA, 120 bp, synthetic construct
  source 1..120: mol_type = other DNA
aatacaataatacatttaattatccaaaacattctacctaccctacacttaaatccttctaaaaaaaatactcccaaatacttatctctctataaaactaccatactttatactacgtaa

SEQ ID NO: 1064 - DNA, 120 bp, synthetic construct
  source 1..120: mol_type = other DNA
aatataatagtgtatttggttatttaggatattttgtttgttttgtatttaggtttttttggggaaagtgtttttagatgtttatttttttataaagttgttatgttttgtgttgcgtga

SEQ ID NO: 1065 - DNA, 120 bp, synthetic construct
  source 1..120: mol_type = other DNA
ttttaaattatctcaaattcatttcaaactctaaaaataaaaaataaaataaaaaccacataacactaacaatcactaaacattattccaaacacacaaataaactaaaaatcctcataa

SEQ ID NO: 1066 - DNA, 120 bp, synthetic construct
  source 1..120: mol_type = other DNA
ttttaggttattttaagtttattttaagttttgaaagtaggaagtaaagtaagaattgtgtggtattagtaattattaggtattgttttaagtatatggataaattgagaatttttgtgg

SEQ ID NO: 1067 - DNA, 120 bp, synthetic construct
  source 1..120: mol_type = other DNA
ttttaaattatctcaaattcatttcaaactctaaaaataaaaaataaaataaaaaccacttcacactaacaatcactaaacattattccaaacacacaaataaactaaaaatcctcataa

SEQ ID NO: 1068 - DNA, 120 bp, synthetic construct
  source 1..120: mol_type = other DNA
ttttaggttattttaagtttattttaagttttgaaagtaggaagtaaagtaagaattgttttgtattagtaattattaggtattgttttaagtatatggataaattgagaatttttgtgg

SEQ ID NO: 1069 - DNA, 120 bp, synthetic construct
  source 1..120: mol_type = other DNA
ttttaaattatctcaaattcatttcaaactctaaaaataaaaaataaaataaaaaccgcgtaacactaacaatcactaaacattattccaaacacacgaataaactaaaaatcctcgtaa

SEQ ID NO: 1070 - DNA, 120 bp, synthetic construct
  source 1..120: mol_type = other DNA
ttttaggttattttaagtttattttaagttttgaaagtaggaagtaaagtaagaatcgcgtggtattagtaattattaggtattgttttaagtatacggataaattgagaattttcgtgg

SEQ ID NO: 1071 - DNA, 120 bp, synthetic construct
  source 1..120: mol_type = other DNA
ttttaaattatctcaaattcatttcaaactctaaaaataaaaaataaaataaaaaccgcttcgcactaacaatcactaaacattattccaaacacacgaataaactaaaaatcctcgtaa

SEQ ID NO: 1072 - DNA, 120 bp, synthetic construct
  source 1..120: mol_type = other DNA
ttttaggttattttaagtttattttaagttttgaaagtaggaagtaaagtaagaatcgtttcgtattagtaattattaggtattgttttaagtatacggataaattgagaattttcgtgg

SEQ ID NO: 1073 - DNA, 120 bp, synthetic construct
  source 1..120: mol_type = other DNA
ataacaacattaataccctacattttaaactttcttaacaaattatttcatatttatacttccatataaaaaaaaatcatcaaacattaaaaaaataactaatttattctttaaaaatac

SEQ ID NO: 1074 - DNA, 120 bp, synthetic construct
  source 1..120: mol_type = other DNA
atggtaatattagtattttatattttgaatttttttaataaattattttatgtttgtgtttttatgtaagaagaagttattaaatattggaaggatagttgatttgttttttaaaaatat

SEQ ID NO: 1075 - DNA, 120 bp, synthetic construct
  source 1..120: mol_type = other DNA
ataacaacattaataccctacattttaaactttcttaacaaattatttcatatttattcttccttataaaaaaaaatcatcaaacattaaaaaaataactaatttattctttaaaaatac

SEQ ID NO: 1076 - DNA, 120 bp, synthetic construct
  source 1..120: mol_type = other DNA
atggtaatattagtattttatattttgaatttttttaataaattattttatgtttgtttttttttgtaagaagaagttattaaatattggaaggatagttgatttgttttttaaaaatat

SEQ ID NO: 1077 - DNA, 120 bp, synthetic construct; identical to SEQ ID NO: 1073
  source 1..120: mol_type = other DNA

SEQ ID NO: 1078 - DNA, 120 bp, synthetic construct; identical to SEQ ID NO: 1074
  source 1..120: mol_type = other DNA

SEQ ID NO: 1079 - DNA, 120 bp, synthetic construct; identical to SEQ ID NO: 1075
  source 1..120: mol_type = other DNA

SEQ ID NO: 1080 - DNA, 120 bp, synthetic construct; identical to SEQ ID NO: 1076
  source 1..120: mol_type = other DNA

SEQ ID NO: 1081 - DNA, 120 bp, synthetic construct
  source 1..120: mol_type = other DNA
aaaccccttactaacttacaattcttcaaatttcccataatttttctaaataaaaacaaaactcctttactaaatctataaaaccttcaataatataaccctactaatataattcaaaac

SEQ ID NO: 1082 - DNA, 120 bp, synthetic construct
  source 1..120: mol_type = other DNA
aggttttttgttggtttataattttttaagttttttatagtttttttggataaaagtaaaatttttttgttggatttataaaatttttaatgatatggttttgttaatataatttaagat

SEQ ID NO: 1083 - DNA, 120 bp, synthetic construct
  source 1..120: mol_type = other DNA
aaaccccttactaacttacaattcttcaaatttcccataatttttctaaataaaatcaaaactccattactaaatctataaaaccttcaataatataaccctactaatataattcaaaac

SEQ ID NO: 1084 - DNA, 120 bp, synthetic construct
  source 1..120: mol_type = other DNA
aggttttttgttggtttataattttttaagttttttatagtttttttggataaaattaaaattttgttgttggatttataaaatttttaatgatatggttttgttaatataatttaagat

SEQ ID NO: 1085 - DNA, 120 bp, synthetic construct; identical to SEQ ID NO: 1081
  source 1..120: mol_type = other DNA

SEQ ID NO: 1086 - DNA, 120 bp, synthetic construct; identical to SEQ ID NO: 1082
  source 1..120: mol_type = other DNA

SEQ ID NO: 1087 - DNA, 120 bp, synthetic construct
  source 1..120: mol_type = other DNA
aaaccccttactaacttacaattcttcaaatttcccataatttttctaaataaaatcaaaactccgttactaaatctataaaaccttcaataatataaccctactaatataattcaaaac

SEQ ID NO: 1088 - DNA, 120 bp, synthetic construct
  source 1..120: mol_type = other DNA
aggttttttgttggtttataattttttaagttttttatagtttttttggataaaattaaaatttcgttgttggatttataaaatttttaatgatatggttttgttaatataatttaagat

SEQ ID NO: 1089 - DNA, 120 bp, synthetic construct
  source 1..120: mol_type = other DNA
ttattataaataacatattaattcatatattttctcccataacttatttctatcttactccataaactccaaaaataaaaaaaaaaattaaatatttatctctatatattaattaccaaa

SEQ ID NO: 1090 - DNA, 120 bp, synthetic construct
  source 1..120: mol_type = other DNA
ttgttatgaatggtatattggtttgtatatttttttttatgatttatttttgttttgttttgtggattttaaaaatgaaagaggaaattagatatttgtttttatatattgattattaaa

SEQ ID NO: 1091 - DNA, 120 bp, synthetic construct
  source 1..120: mol_type = other DNA
ttattataaataacatattaattcatatattttctcccataacttatttctatctttctccataatctccaaaaataaaaaaaaaaattaaatatttatctctatatattaattaccaaa

SEQ ID NO: 1092 - DNA, 120 bp, synthetic construct
  source 1..120: mol_type = other DNA
ttgttatgaatggtatattggtttgtatatttttttttatgatttatttttgtttttttttgtggtttttaaaaatgaaagaggaaattagatatttgtttttatatattgattattaaa

SEQ ID NO: 1093 - DNA, 120 bp, synthetic construct
  source 1..120: mol_type = other DNA
ttattataaataacatattaattcgtatattttctcccataacttatttctatcttactccgtaaactccaaaaataaaaaaaaaaattaaatatttatctctatatattaattaccaaa

SEQ ID NO: 1094 - DNA, 120 bp, synthetic construct
  source 1..120: mol_type = other DNA
ttgttatgaatggtatattggttcgtatatttttttttatgatttatttttgttttgtttcgtggattttaaaaatgaaagaggaaattagatatttgtttttatatattgattattaaa

SEQ ID NO: 1095 - DNA, 120 bp, synthetic construct
  source 1..120: mol_type = other DNA
ttattataaataacatattaattcgtatattttctcccataacttatttctatctttctccgtaatctccaaaaataaaaaaaaaaattaaatatttatctctatatattaattaccaaa

SEQ ID NO: 1096 - DNA, 120 bp, synthetic construct
  source 1..120: mol_type = other DNA
ttgttatgaatggtatattggttcgtatatttttttttatgatttatttttgttttttttcgtggtttttaaaaatgaaagaggaaattagatatttgtttttatatattgattattaaa

SEQ ID NO: 1097 - DNA, 120 bp, synthetic construct
  source 1..120: mol_type = other DNA
accaatctcaaacaataatttcccaaatatacaaaccttcacaccaaatctataaaatccccaatacaaaaacctctttactaattataaaaaaaacattaaaaaaaccaaacttccaat

SEQ ID NO: 1098 - DNA, 120 bp, synthetic construct
  source 1..120: mol_type = other DNA
attagttttaggtaatggttttttaaatatataagtttttatattaggtttgtaaaatttttaatataggaatttttttgttaattatagagagggtattaaagagattaagtttttagt

SEQ ID NO: 1099 - DNA, 120 bp, synthetic construct
  source 1..120: mol_type = other DNA
accaatctcaaacaataatttcccaaatatacaaaccttcacaccaaatctataacatccccaatccaaaaacctctttactaattataaaaaaaacattaaaaaaaccaaacttccaat

SEQ ID NO: 1100 - DNA, 120 bp, synthetic construct
  source 1..120: mol_type = other DNA
attagttttaggtaatggttttttaaatatataagtttttatattaggtttgtaatatttttaatttaggaatttttttgttaattatagagagggtattaaagagattaagtttttagt

SEQ ID NO: 1101 - DNA, 120 bp, synthetic construct; identical to SEQ ID NO: 1097
  source 1..120: mol_type = other DNA

SEQ ID NO: 1102 - DNA, 120 bp, synthetic construct; identical to SEQ ID NO: 1098
  source 1..120: mol_type = other DNA

SEQ ID NO: 1103 - DNA, 120 bp, synthetic construct; identical to SEQ ID NO: 1099
  source 1..120: mol_type = other DNA

SEQ ID NO: 1104 - DNA, 120 bp, synthetic construct; identical to SEQ ID NO: 1100
  source 1..120: mol_type = other DNA

SEQ ID NO: 1105 - DNA, 120 bp, synthetic construct
  source 1..120: mol_type = other DNA
ttaaatttaaatcaaataaacaaataactatacatactcatattctctaccactaaaaattatactaaaataatttatttcatcactttaacctaaacaattcctattcatctttcaact

SEQ ID NO: 1106 - DNA, 120 bp, synthetic construct
  source 1..120: mol_type = other DNA
ttggatttaaattagataaataaataattgtatatgtttatattttttgttattagggattatgttgaggtgatttgttttgttattttaatttagataatttttatttattttttagtt

SEQ ID NO: 1107 - DNA, 120 bp, synthetic construct
  source 1..120: mol_type = other DNA
ttaaatttaaatcaaataaacaaataactatacatactcatattctctaccactaaatattataataaaataatttatttcatcactttaacctaaacaattcctattcatctttcaact

SEQ ID NO: 1108 - DNA, 120 bp, synthetic construct
  source 1..120: mol_type = other DNA
ttggatttaaattagataaataaataattgtatatgtttatattttttgttattaggtattatgatgaggtgatttgttttgttattttaatttagataatttttatttattttttagtt

SEQ ID NO: 1109 - DNA, 120 bp, synthetic construct
  source 1..120: mol_type = other DNA
ttaaatttaaatcaaataaacaaataactatacatactcatattctctaccactaaaaattatactaaaataatttatttcgtcactttaacctaaacaattcctattcatctttcaact

SEQ ID NO: 1110 - DNA, 120 bp, synthetic construct
  source 1..120: mol_type = other DNA
ttggatttaaattagataaataaataattgtatatgtttatattttttgttattagggattatgttgaggtgatttgtttcgttattttaatttagataatttttatttattttttagtt

SEQ ID NO: 1111 - DNA, 120 bp, synthetic construct
  source 1..120: mol_type = other DNA
ttaaatttaaatcaaataaacaaataactatacatactcatattctctaccactaaatattataataaaataatttatttcgtcactttaacctaaacaattcctattcatctttcaact

SEQ ID NO: 1112 - DNA, 120 bp, synthetic construct
  source 1..120: mol_type = other DNA
ttggatttaaattagataaataaataattgtatatgtttatattttttgttattaggtattatgatgaggtgatttgtttcgttattttaatttagataatttttatttattttttagtt

SEQ ID NO: 1113 - DNA, 120 bp, synthetic construct
  source 1..120: mol_type = other DNA
attctacaactatccccaaaccctccacctcttctcaaaaatctaccatcaaaatcttcaacatatataatttacttactttatcaacctaatcataaaataacttaaactcataacaaa

SEQ ID NO: 1114 - DNA, 120 bp, synthetic construct
  source 1..120: mol_type = other DNA
attttgtgattgtttttagattttttgtttttttttagaggtttgttattaggatttttagtgtgtatgatttgtttattttgttagtttaattataaggtaatttgagtttatagtaga

SEQ ID NO: 1115 - DNA, 120 bp, synthetic construct
  source 1..120: mol_type = other DNA
attctacaactatccccaaaccctccacctcttctcaaaaatctaccatcaaaatctacaacatctataatttacttactttatcaacctaatcataaaataacttaaactcataacaaa

SEQ ID NO: 1116 - DNA, 120 bp, synthetic construct
  source 1..120: mol_type = other DNA
attttgtgattgtttttagattttttgtttttttttagaggtttgttattaggatttgtagtgtttatgatttgtttattttgttagtttaattataaggtaatttgagtttatagtaga

SEQ ID NO: 1117 - DNA, 120 bp, synthetic construct
  source 1..120: mol_type = other DNA
attctacgactatccccaaaccctccgcctcttctcaaaaatctaccatcaaaatcttcaacgtatataatttacttactttatcaacctaatcataaaataacttaaactcataacaaa

SEQ ID NO: 1118 - DNA, 120 bp, synthetic construct
  source 1..120: mol_type = other DNA
attttgcgattgtttttagatttttcgtttttttttagaggtttgttattaggatttttagcgtgtatgatttgtttattttgttagtttaattataaggtaatttgagtttatagtaga

SEQ ID NO: 1119 - DNA, 120 bp, synthetic construct
  source 1..120: mol_type = other DNA
attctacgactatccccaaaccctccgcctcttctcaaaaatctaccatcaaaatctacaacgtctataatttacttactttatcaacctaatcataaaataacttaaactcataacaaa

SEQ ID NO: 1120 - DNA, 120 bp, synthetic construct
  source 1..120: mol_type = other DNA
attttgcgattgtttttagatttttcgtttttttttagaggtttgttattaggatttgtagcgtttatgatttgtttattttgttagtttaattataaggtaatttgagtttatagtaga

SEQ ID NO: 1121 - DNA, 120 bp, synthetic construct
  source 1..120: mol_type = other DNA
aacatttctctactaaaactaataaatttaaacactctaaaataaaaaacatataatcaaaaacttaaaatcctccttttacttccactctatatccactcctaccttaaaaaaaaattt

SEQ ID NO: 1122 - DNA, 120 bp, synthetic construct
  source 1..120: mol_type = other DNA
agtatttttttgttggaattggtgggtttgggtgttttagagtggagggtatgtgattgagagtttggggttttttttttatttttattttatgtttatttttgttttgggaaaaggttt

SEQ ID NO: 1123 - DNA, 120 bp, synthetic construct
  source 1..120: mol_type = other DNA
aacatttctctactaaaactaataaatttaaacactctaaaataaaaaacatataataaaaaacataaaatcctccttttacttccactctatatccactcctaccttaaaaaaaaattt

SEQ ID NO: 1124 - DNA, 120 bp, synthetic construct
  source 1..120: mol_type = other DNA
agtatttttttgttggaattggtgggtttgggtgttttagagtggagggtatgtgatggagagtatggggttttttttttatttttattttatgtttatttttgttttgggaaaaggttt

SEQ ID NO: 1125 - DNA, 120 bp, synthetic construct
  source 1..120: mol_type = other DNA
aacatttctctactaaaactaataaatttaaacgctctaaaataaaaaacatataatcgaaaacttaaaatcctccttttacttccactctatatccactcctaccttaaaaaaaaattt

SEQ ID NO: 1126 - DNA, 120 bp, synthetic construct
  source 1..120: mol_type = other DNA
agtatttttttgttggaattggtgggtttgggcgttttagagtggagggtatgtgatcgagagtttggggttttttttttatttttattttatgtttatttttgttttgggaaaaggttt

SEQ ID NO: 1127 - DNA, 120 bp, synthetic construct
  source 1..120: mol_type = other DNA
aacatttctctactaaaactaataaatttaaacgctctaaaataaaaaacatataataaaaaacataaaatcctccttttacttccactctatatccactcctaccttaaaaaaaaattt

SEQ ID NO: 1128 - DNA, 120 bp, synthetic construct
  source 1..120: mol_type = other DNA
agtatttttttgttggaattggtgggtttgggcgttttagagtggagggtatgtgatggagagtatggggttttttttttatttttattttatgtttatttttgttttgggaaaaggttt

SEQ ID NO: 1129 - DNA, 120 bp, synthetic construct
  source 1..120: mol_type = other DNA
ttccacctttaccacaaattactaaaaaaaacaaaaaacaaaacaaaacatctacaataaaaaacacccaaatattcatataaaaaaacaacacaaaaaaaaaaaaaaaaccttcaatcc

SEQ ID NO: 1130 - DNA, 120 bp, synthetic construct
  source 1..120: mol_type = other DNA
ttttatttttattatagattattggggagggtaggaggtagggtaaggtatttgtaatgaggagtatttaggtgtttatgtgagagagtaatataggaaaaaaaaaaaagtttttagttt

SEQ ID NO: 1131 - DNA, 120 bp, synthetic construct
  source 1..120: mol_type = other DNA
ttccacctttaccacaaattactaaaaaaaacaaaaaacaaaacaaaacatctacaaaaaaaaaaacccaaatattcatataaaaaaacaacacaaaaaaaaaaaaaaaaccttcaatcc

SEQ ID NO: 1132 - DNA, 120 bp, synthetic construct
  source 1..120: mol_type = other DNA
ttttatttttattatagattattggggagggtaggaggtagggtaaggtatttgtaaagaggaggatttaggtgtttatgtgagagagtaatataggaaaaaaaaaaaagtttttagttt

SEQ ID NO: 1133 - DNA, 120 bp, synthetic construct; identical to SEQ ID NO: 1129
  source 1..120: mol_type = other DNA

SEQ ID NO: 1134 - DNA, 120 bp, synthetic construct; identical to SEQ ID NO: 1130
  source 1..120: mol_type = other DNA

SEQ ID NO: 1135 - DNA, 120 bp, synthetic construct; identical to SEQ ID NO: 1131
  source 1..120: mol_type = other DNA

SEQ ID NO: 1136 - DNA, 120 bp, synthetic construct; identical to SEQ ID NO: 1132
  source 1..120: mol_type = other DNA

SEQ ID NO: 1137 - DNA, 120 bp, synthetic construct
  source 1..120: mol_type = other DNA
taatttcccaaataaaaccataataaaaataaacaaaactaacatcaaaccaaccatttcttaccatacatcaaacttttaaaatcaaacaaaattaaaaacacatttaaaaaaattaat

SEQ ID NO: 1138 - DNA, 120 bp, synthetic construct
  source 1..120: mol_type = other DNA
tggttttttaggtaaagttatggtaagggtaggtaaaattggtattaggttaattgttttttattatgtattaaatttttgaggttaggtaaaattgaaaatatatttggagaagttaat

SEQ ID NO: 1139 - DNA, 120 bp, synthetic construct
  source 1..120: mol_type = other DNA
taatttcccaaataaaaccataataaaaataaacaaaactaacatcaaaccaaccatttcaaaccatacatcaaacttttaaaatcaaacaaaattaaaaacacatttaaaaaaattaat

SEQ ID NO: 1140 - DNA, 120 bp, synthetic construct
  source 1..120: mol_type = other DNA
tggttttttaggtaaagttatggtaagggtaggtaaaattggtattaggttaattgttttaaattatgtattaaatttttgaggttaggtaaaattgaaaatatatttggagaagttaat

SEQ ID NO: 1141 - DNA, 120 bp, synthetic construct
  source 1..120: mol_type = other DNA
taatttcccaaataaaaccataataaaaataaacaaaactaacatcaaaccaaccgtttcttaccatacatcaaacttttaaaatcaaacaaaattaaaaacacatttaaaaaaattaat

SEQ ID NO: 1142 - DNA, 120 bp, synthetic construct
  source 1..120: mol_type = other DNA
tggttttttaggtaaagttatggtaagggtaggtaaaattggtattaggttaatcgttttttattatgtattaaatttttgaggttaggtaaaattgaaaatatatttggagaagttaat

SEQ ID NO: 1143 - DNA, 120 bp, synthetic construct
  source 1..120: mol_type = other DNA
taatttcccaaataaaaccataataaaaataaacaaaactaacatcaaaccaaccgtttcaaaccatacatcaaacttttaaaatcaaacaaaattaaaaacacatttaaaaaaattaat

SEQ ID NO: 1144 - DNA, 120 bp, synthetic construct
  source 1..120: mol_type = other DNA
tggttttttaggtaaagttatggtaagggtaggtaaaattggtattaggttaatcgttttaaattatgtattaaatttttgaggttaggtaaaattgaaaatatatttggagaagttaat

SEQ ID NO: 1145 - DNA, 120 bp, synthetic construct
  source 1..120: mol_type = other DNA
taaactaaatactaaaaaaacccaaatattaaaacaaaccataaaatacctaaacaaaaattactaatcttctccaaattccctccccatacccaaaaaaacaaaccttcctatctaaaa

SEQ ID NO: 1146 - DNA, 120 bp, synthetic construct
  source 1..120: mol_type = other DNA
tggattgggtattaaggaagtttaggtgttggagtaagttatgaaatatttgaatggaagttgttgattttttttaagttttttttttgtatttagaagagtaggtttttttgtttgaga

SEQ ID NO: 1147 - DNA, 120 bp, synthetic construct
  source 1..120: mol_type = other DNA
taaactaaatactaaaaaaacccaaatattaaaacaaaccataaaatacctaaacaaaaaaaactaatcttctccaaattccctccccatacccaaaaaaacaaaccttcctatctaaaa

SEQ ID NO: 1148 - DNA, 120 bp, synthetic construct
  source 1..120: mol_type = other DNA
tggattgggtattaaggaagtttaggtgttggagtaagttatgaaatatttgaatggaaggagttgattttttttaagttttttttttgtatttagaagagtaggtttttttgtttgaga

SEQ ID NO: 1149 - DNA, 120 bp, synthetic construct
  source 1..120: mol_type = other DNA
taaactaaatactaaaaaaacccaaatattaaaacaaaccataaaatacctaaacgaaaattactaatcttctccaaattccctccccgtacccaaaaaaacaaaccttcctatctaaaa

SEQ ID NO: 1150 - DNA, 120 bp, synthetic construct
  source 1..120: mol_type = other DNA
tggattgggtattaaggaagtttaggtgttggagtaagttatgaaatatttgaacggaagttgttgattttttttaagtttttttttcgtatttagaagagtaggtttttttgtttgaga

SEQ ID NO: 1151 - DNA, 120 bp, synthetic construct
  source 1..120: mol_type = other DNA
taaactaaatactaaaaaaacccaaatattaaaacaaaccataaaatacctaaacgaaaaaaactaatcttctccaaattccctccccgtacccaaaaaaacaaaccttcctatctaaaa

SEQ ID NO: 1152 - DNA, 120 bp, synthetic construct
  source 1..120: mol_type = other DNA
tggattgggtattaaggaagtttaggtgttggagtaagttatgaaatatttgaacggaaggagttgattttttttaagtttttttttcgtatttagaagagtaggtttttttgtttgaga

SEQ ID NO: 1153 - DNA, 120 bp, synthetic construct
  source 1..120: mol_type = other DNA
taacaacctaacaaaatacaaaatacattttaacatattactttaacctaaaccatataccatctaaaatatataatatactcaatttatttaaaaacttattaaaaacactactccttc

SEQ ID NO: 1154 - DNA, 120 bp, synthetic construct
  source 1..120: mol_type = other DNA
taatagtttgataaaatgtaaaatatattttagtatgttgttttaatttagattatgtattgtttagaatatatagtatatttagtttgtttgagagtttattagaagtattattttttt

SEQ ID NO: 1155 - DNA, 120 bp, synthetic construct
  source 1..120: mol_type = other DNA
taacaacctaacaaaatacaaaatacattttaacatattactttaacctaaaccatatacactctaaaatatataatatactcaatttatttaaaaacttattaaaaacactactccttc

SEQ ID NO: 1156 - DNA, 120 bp, synthetic construct
  source 1..120: mol_type = other DNA
taatagtttgataaaatgtaaaatatattttagtatgttgttttaatttagattatgtatattttagaatatatagtatatttagtttgtttgagagtttattagaagtattattttttt

SEQ ID NO: 1157 - DNA, 120 bp, synthetic construct
  source 1..120: mol_type = other DNA
taacaacctaacaaaatacaaaatacattttaacatattactttaacctaaaccatataccgtctaaaatatataatatactcaatttatttaaaaacttattaaaaacactactccttc

SEQ ID NO: 1158 - DNA, 120 bp, synthetic construct
  source 1..120: mol_type = other DNA
taatagtttgataaaatgtaaaatatattttagtatgttgttttaatttagattatgtatcgtttagaatatatagtatatttagtttgtttgagagtttattagaagtattattttttt

SEQ ID NO: 1159 - DNA, 120 bp, synthetic construct; identical to SEQ ID NO: 1155
  source 1..120: mol_type = other DNA

SEQ ID NO: 1160 - DNA, 120 bp, synthetic construct; identical to SEQ ID NO: 1156
  source 1..120: mol_type = other DNA

SEQ ID NO: 1161 - DNA, 120 bp, synthetic construct
  source 1..120: mol_type = other DNA
aaaaaatacacacatacaacaataaaaacattattcctcaccctacaaataacataaaacaaaaacaatctaaccttcaacacctcaacaccttctccaacacctccacattttaaaaaa

SEQ ID NO: 1162 - DNA, 120 bp, synthetic construct
  source 1..120: mol_type = other DNA
gagaaatatatatatataataatggaggtattgttttttattttgtagatgatgtgaggtagaagtaatttgatttttaatattttaatattttttttaatatttttatattttaggaaa

SEQ ID NO: 1163 - DNA, 120 bp, synthetic construct
  source 1..120: mol_type = other DNA
aaaaaatacacacatacaacaataaaaacattattcctcaccctacaaataacataaaacccaaacaatctaaccttcaacacctcaacaccttctccaacacctccacattttaaaaaa

SEQ ID NO: 1164 - DNA, 120 bp, synthetic construct
  source 1..120: mol_type = other DNA
gagaaatatatatatataataatggaggtattgttttttattttgtagatgatgtgaggtttaagtaatttgatttttaatattttaatattttttttaatatttttatattttaggaaa

SEQ ID NO: 1165 - DNA, 120 bp, synthetic construct
  source 1..120: mol_type = other DNA
aaaaaatacacacatacaacaataaaaacattattcctcaccctacaaataacgtaaaacaaaaacaatctaaccttcaacacctcaacaccttctccaacacctccacattttaaaaaa

SEQ ID NO: 1166 - DNA, 120 bp, synthetic construct
  source 1..120: mol_type = other DNA
gagaaatatatatatataataatggaggtattgttttttattttgtagatgacgtgaggtagaagtaatttgatttttaatattttaatattttttttaatatttttatattttaggaaa

SEQ ID NO: 1167 - DNA, 120 bp, synthetic construct
  source 1..120: mol_type = other DNA
aaaaaatacacacatacaacaataaaaacattattcctcaccctacaaataacgtaaaacccaaacaatctaaccttcaacacctcaacaccttctccaacacctccacattttaaaaaa

SEQ ID NO: 1168 - DNA, 120 bp, synthetic construct
  source 1..120: mol_type = other DNA
gagaaatatatatatataataatggaggtattgttttttattttgtagatgacgtgaggtttaagtaatttgatttttaatattttaatattttttttaatatttttatattttaggaaa

SEQ ID NO: 1169 - DNA, 120 bp, synthetic construct
  source 1..120: mol_type = other DNA
aaatccataatcaaaaactaaaacccctaaaaactttcaatcctaccacaacataaaattaactcatatcaaaaccaacaaaccaactaaaaaaaaaaaacataaatcaaaacaaaccca

SEQ ID NO: 1170 - DNA, 120 bp, synthetic construct
  source 1..120: mol_type = other DNA
aagtttatagttaagggttaagatttttagaggtttttagttttgttatagtatgaagttggtttatattagagttagtgagttagttggaaagaaaggatatgggttaaggtaagttta

SEQ ID NO: 1171 - DNA, 120 bp, synthetic construct
  source 1..120: mol_type = other DNA
aaatccataatcaaaaactaaaacccctaaaaactttcaatcctaccacaacataaaattctctcatatcaaaaccaacaaaccaactaaaaaaaaaaaacataaatcaaaacaaaccca

SEQ ID NO: 1172 - DNA, 120 bp, synthetic construct
  source 1..120: mol_type = other DNA
aagtttatagttaagggttaagatttttagaggtttttagttttgttatagtatgaagtttttttatattagagttagtgagttagttggaaagaaaggatatgggttaaggtaagttta

SEQ ID NO: 1173 - DNA, 120 bp, synthetic construct
  source 1..120: mol_type = other DNA
aaatccataatcaaaaactaaaacccctaaaaactttcaatcctaccacaacataaaattaactcatatcaaaaccaacgaaccaactaaaaaaaaaaaacataaatcaaaacaaaccca

SEQ ID NO: 1174 - DNA, 120 bp, synthetic construct
  source 1..120: mol_type = other DNA
aagtttatagttaagggttaagatttttagaggtttttagttttgttatagtatgaagttggtttatattagagttagcgagttagttggaaagaaaggatatgggttaaggtaagttta

SEQ ID NO: 1175 - DNA, 120 bp, synthetic construct
  source 1..120: mol_type = other DNA
aaatccataatcaaaaactaaaacccctaaaaactttcaatcctaccacaacataaaattctctcatatcaaaaccaacgaaccaactaaaaaaaaaaaacataaatcaaaacaaaccca

SEQ ID NO: 1176 - DNA, 120 bp, synthetic construct
  source 1..120: mol_type = other DNA
aagtttatagttaagggttaagatttttagaggtttttagttttgttatagtatgaagtttttttatattagagttagcgagttagttggaaagaaaggatatgggttaaggtaagttta

SEQ ID NO: 1177 - DNA, 120 bp, synthetic construct
  source 1..120: mol_type = other DNA
caaacacctatttatctaaaatacaatacaaaaaaataataaaaaacaccacataaactaatataaaaaattttcaataaattacttaaaattaaatataaactaactaatataaaaata

SEQ ID NO: 1178 - DNA, 120 bp, synthetic construct
  source 1..120: mol_type = other DNA
taagtatttgtttatttggagtgtagtataggaggatgatgagaaatattatataagttggtatgagaaatttttagtgggttgtttaagattaagtgtgggttagttagtgtaagaata

SEQ ID NO: 1179 - DNA, 120 bp, synthetic construct
  source 1..120: mol_type = other DNA
caaacacctatttatctaaaatacaatacaaaaaaataataaaaaacaccacataaactataataaaaaattttcaataaattacttaaaattaaatataaactaactaatataaaaata

SEQ ID NO: 1180 - DNA, 120 bp, synthetic construct
  source 1..120: mol_type = other DNA
taagtatttgtttatttggagtgtagtataggaggatgatgagaaatattatataagttgtaatgagaaatttttagtgggttgtttaagattaagtgtgggttagttagtgtaagaata

SEQ ID NO: 1181 - DNA, 120 bp, synthetic construct; identical to SEQ ID NO: 1177
  source 1..120: mol_type = other DNA

SEQ ID NO: 1182 - DNA, 120 bp, synthetic construct; identical to SEQ ID NO: 1178
  source 1..120: mol_type = other DNA

SEQ ID NO: 1183 - DNA, 120 bp, synthetic construct; identical to SEQ ID NO: 1179
  source 1..120: mol_type = other DNA

SEQ ID NO: 1184 - DNA, 120 bp, synthetic construct; identical to SEQ ID NO: 1180
  source 1..120: mol_type = other DNA

SEQ ID NO: 1185 - DNA, 120 bp, synthetic construct
  source 1..120: mol_type = other DNA
ctaccaactctctactcctatatacaaatcttcacctaaatcaatatttaacccctaactaaaatcaatatttaatcccaaaccaaccaaccctacaatccaacattcctcatctaacct

SEQ ID NO: 1186 - DNA, 120 bp, synthetic construct
  source 1..120: mol_type = other DNA
ttgttaattttttgtttttatgtatagatttttatttgagttaatgtttaatttttgattggagttaatgtttaattttaggttagttagttttgtaatttagtattttttatttagttt

SEQ ID NO: 1187 - DNA, 120 bp, synthetic construct
  source 1..120: mol_type = other DNA
ctaccaactctctactcctatatacaaatcttcacctaaatcaatatttaacccctaacttcaatcaatatttaatcccaaaccaaccaaccctacaatccaacattcctcatctaacct

SEQ ID NO: 1188 - DNA, 120 bp, synthetic construct
  source 1..120: mol_type = other DNA
ttgttaattttttgtttttatgtatagatttttatttgagttaatgtttaatttttgattttagttaatgtttaattttaggttagttagttttgtaatttagtattttttatttagttt

SEQ ID NO: 1189 - DNA, 120 bp, synthetic construct; identical to SEQ ID NO: 1185
  source 1..120: mol_type = other DNA

SEQ ID NO: 1190 - DNA, 120 bp, synthetic construct; identical to SEQ ID NO: 1186
  source 1..120: mol_type = other DNA

SEQ ID NO: 1191 - DNA, 120 bp, synthetic construct; identical to SEQ ID NO: 1187
  source 1..120: mol_type = other DNA

SEQ ID NO: 1192 - DNA, 120 bp, synthetic construct; identical to SEQ ID NO: 1188
  source 1..120: mol_type = other DNA

SEQ ID NO: 1193 - DNA, 120 bp, synthetic construct
  source 1..120: mol_type = other DNA
ataaatattcctactaaaaaaaaaaaaaatatacaaataccaaactttaacacaaaaaaactaaatttccttaaacaaatcacttaacaccctaaaaaccatctataaaataaactaata

SEQ ID NO: 1194 - DNA, 120 bp, synthetic construct
  source 1..120: mol_type = other DNA
gtaagtatttttattgaaagaggaaaaggtatatagatgttgagttttgatatggaggaattgagtttttttgggtaagttatttaatattttgaggattatttgtaaagtgggttaatg

SEQ ID NO: 1195 - DNA, 120 bp, synthetic construct
  source 1..120: mol_type = other DNA
ataaatattcctactaaaaaaaaaaaaaatatacaaataccaaactttaacacaaaaaaaaaaaatttccttaaacaaatcacttaacaccctaaaaaccatctataaaataaactaata

SEQ ID NO: 1196 - DNA, 120 bp, synthetic construct
  source 1..120: mol_type = other DNA
gtaagtatttttattgaaagaggaaaaggtatatagatgttgagttttgatatggaggaaaagagtttttttgggtaagttatttaatattttgaggattatttgtaaagtgggttaatg

SEQ ID NO: 1197 - DNA, 120 bp, synthetic construct
  source 1..120: mol_type = other DNA
ataaatattcctactaaaaaaaaaaaaaatatacaaataccgaactttaacacgaaaaaactaaatttccttaaacaaatcacttaacaccctaaaaaccatctataaaataaactaata

SEQ ID NO: 1198 - DNA, 120 bp, synthetic construct
  source 1..120: mol_type = other DNA
gtaagtatttttattgaaagaggaaaaggtatatagatgtcgagttttgatacggaggaattgagtttttttgggtaagttatttaatattttgaggattatttgtaaagtgggttaatg

SEQ ID NO: 1199 - DNA, 120 bp, synthetic construct
  source 1..120: mol_type = other DNA
ataaatattcctactaaaaaaaaaaaaaatatacaaataccgaactttaacacgaaaaaaaaaaatttccttaaacaaatcacttaacaccctaaaaaccatctataaaataaactaata

SEQ ID NO: 1200 - DNA, 120 bp, synthetic construct
  source 1..120: mol_type = other DNA
gtaagtatttttattgaaagaggaaaaggtatatagatgtcgagttttgatacggaggaaaagagtttttttgggtaagttatttaatattttgaggattatttgtaaagtgggttaatg

SEQ ID NO: 1201 - DNA, 120 bp, synthetic construct
  source 1..120: mol_type = other DNA
tccacttatcctaaataaaatttacaaaaccttctctccacaactacttacccttacaactatctaattataaaaataaaataataaacttcaactatctatccccacccaaatctcatc

SEQ ID NO: 1202 - DNA, 120 bp, synthetic construct
  source 1..120: mol_type = other DNA
tttatttgttttaagtagaatttgtaaggttttttttttataattatttatttttgtaattatttgattgtagagatggagtgatgagttttgattgtttgtttttatttaaattttatt

SEQ ID NO: 1203 - DNA, 120 bp, synthetic construct
  source 1..120: mol_type = other DNA
tccacttatcctaaataaaatttacaaaaccttctctccacaactacttacccttacaacactctaattataaaaataaaataataaacttcaactatctatccccacccaaatctcatc

SEQ ID NO: 1204 - DNA, 120 bp, synthetic construct
  source 1..120: mol_type = other DNA
tttatttgttttaagtagaatttgtaaggttttttttttataattatttatttttgtaatattttgattgtagagatggagtgatgagttttgattgtttgtttttatttaaattttatt

SEQ ID NO: 1205 - DNA, 120 bp, synthetic construct
  source 1..120: mol_type = other DNA
tccacttatcctaaataaaatttacaaaaccttctctccacaactacttacccttacaactatctaattataaaaataaaataataaacttcgactatctatccccacccaaatctcatc

SEQ ID NO: 1206 - DNA, 120 bp, synthetic construct
  source 1..120: mol_type = other DNA
tttatttgttttaagtagaatttgtaaggttttttttttataattatttatttttgtaattatttgattgtagagatggagtgatgagtttcgattgtttgtttttatttaaattttatt

SEQ ID NO: 1207 - DNA, 120 bp, synthetic construct
  source 1..120: mol_type = other DNA
tccacttatcctaaataaaatttacaaaaccttctctccacaactacttacccttacaacactctaattataaaaataaaataataaacttcgactatctatccccacccaaatctcatc

SEQ ID NO: 1208 - DNA, 120 bp, synthetic construct
  source 1..120: mol_type = other DNA
tttatttgttttaagtagaatttgtaaggttttttttttataattatttatttttgtaatattttgattgtagagatggagtgatgagtttcgattgtttgtttttatttaaattttatt

SEQ ID NO: 1209 - DNA, 120 bp, synthetic construct
  source 1..120: mol_type = other DNA
aatatatctattttattattttttcaccataaacaaattattcacatatctattcaataattaaaaataccttttaaaaacactattactctaaaaattaaattattatactttatatta

SEQ ID NO: 1210 - DNA, 120 bp, synthetic construct
  source 1..120: mol_type = other DNA
aatgtgtttattttattgtttttttattataggtaagttgtttatatatttatttagtggttaaaagtgttttttaaaaatattgttgttttaaggattgagttattatattttatatta

SEQ ID NO: 1211 - DNA, 120 bp, synthetic construct
  source 1..120: mol_type = other DNA
aatatatctattttattattttttcaccataaacaaattattcacatatctattcaataaaaaaaaataccttttaaaaacactattactctaaaaattaaattattatactttatatta

SEQ ID NO: 1212 - DNA, 120 bp, synthetic construct
  source 1..120: mol_type = other DNA
aatgtgtttattttattgtttttttattataggtaagttgtttatatatttatttagtgggaaaaagtgttttttaaaaatattgttgttttaaggattgagttattatattttatatta

SEQ ID NO: 1213 - DNA, 120 bp, synthetic construct; identical to SEQ ID NO: 1209
  source 1..120: mol_type = other DNA

SEQ ID NO: 1214 - DNA, 120 bp, synthetic construct; identical to SEQ ID NO: 1210
  source 1..120: mol_type = other DNA

SEQ ID NO: 1215 - DNA, 120 bp, synthetic construct; identical to SEQ ID NO: 1211
  source 1..120: mol_type = other DNA

SEQ ID NO: 1216 - DNA, 120 bp, synthetic construct; identical to SEQ ID NO: 1212
  source 1..120: mol_type = other DNA

SEQ ID NO: 1217 - DNA, 120 bp, synthetic construct
  source 1..120: mol_type = other DNA
ttcttaatacaaaaactaacctaccaatatcctcccaactacccaataataacaaaactttaacccaattatcttaactccaaaatcaacatttccatacaataaaaaaaccaaaatcaa

SEQ ID NO: 1218 - DNA, 120 bp, synthetic construct
  source 1..120: mol_type = other DNA
tttttaatgtaggaattagtttgttgatatttttttagttatttagtggtgataaggttttagtttagttgttttggttttaaggttagtatttttgtgtaatgggagagttgaaattag

SEQ ID NO: 1219 - DNA, 120 bp, synthetic construct
  source 1..120: mol_type = other DNA
ttcttaatacaaaaactaacctaccaatatcctcccaactacccaataataacaaaacttacacccaattatcttaactccaaaatcaacatttccatacaataaaaaaaccaaaatcaa

SEQ ID NO: 1220 - DNA, 120 bp, synthetic construct
  source 1..120: mol_type = other DNA
tttttaatgtaggaattagtttgttgatatttttttagttatttagtggtgataaggtttatgtttagttgttttggttttaaggttagtatttttgtgtaatgggagagttgaaattag

SEQ ID NO: 1221 - DNA, 120 bp, synthetic construct
  source 1..120: mol_type = other DNA
ttcttaatacaaaaactaacctaccgatatcctcccaactacccaataataacaaaactttaacccaattatcttaactccaaaatcaacatttccgtacaataaaaaaaccgaaatcaa

SEQ ID NO: 1222 - DNA, 120 bp, synthetic construct
  source 1..120: mol_type = other DNA
tttttaatgtaggaattagtttgtcgatatttttttagttatttagtggtgataaggttttagtttagttgttttggttttaaggttagtattttcgtgtaatgggagagtcgaaattag

SEQ ID NO: 1223 - DNA, 120 bp, synthetic construct
  source 1..120: mol_type = other DNA
ttcttaatacaaaaactaacctaccgatatcctcccaactacccaataataacaaaacttacgcccaattatcttaactccaaaatcaacatttccgtacaataaaaaaaccgaaatcaa

SEQ ID NO: 1224 - DNA, 120 bp, synthetic construct
  source 1..120: mol_type = other DNA
tttttaatgtaggaattagtttgtcgatatttttttagttatttagtggtgataaggtttacgtttagttgttttggttttaaggttagtattttcgtgtaatgggagagtcgaaattag

SEQ ID NO: 1225 - DNA, 120 bp, synthetic construct
  source 1..120: mol_type = other DNA
cacaactttctctaacaaatactcaaacaaaaaatcacaaataaacactattctaacaattaccaaacaaaccaacctctttctaatcccactaaaaaactaaacaataacacaatctat

SEQ ID NO: 1226 - DNA, 120 bp, synthetic construct
  source 1..120: mol_type = other DNA
tatagttttttttggtagatgtttagataagaggttatggataggtattgttttggtaattgttagataaattaatttttttttgattttattgagaggttggataataatatagtttgt

SEQ ID NO: 1227 - DNA, 120 bp, synthetic construct
  source 1..120: mol_type = other DNA
cacaactttctctaacaaatactcaaacaaaaaatcacaaataaacactattctaacaatacccaaacaaaccaacctctttctaatcccactaaaaaactaaacaataacacaatctat

SEQ ID NO: 1228 - DNA, 120 bp, synthetic construct
  source 1..120: mol_type = other DNA
tatagttttttttggtagatgtttagataagaggttatggataggtattgttttggtaatgtttagataaattaatttttttttgattttattgagaggttggataataatatagtttgt

SEQ ID NO: 1229 - DNA, 120 bp, synthetic construct
  source 1..120: mol_type = other DNA
cacaactttctctaacaaatactcaaacaaaaaatcacgaataaacactattctaacaattaccaaacaaaccaacctctttctaatcccactaaaaaactaaacaataacacaatctat

SEQ ID NO: 1230 - DNA, 120 bp, synthetic construct
  source 1..120: mol_type = other DNA
tatagttttttttggtagatgtttagataagaggttacggataggtattgttttggtaattgttagataaattaatttttttttgattttattgagaggttggataataatatagtttgt

SEQ ID NO: 1231 - DNA, 120 bp, synthetic construct
  source 1..120: mol_type = other DNA
cacaactttctctaacaaatactcaaacaaaaaatcacgaataaacactattctaacaatacccaaacaaaccaacctctttctaatcccactaaaaaactaaacaataacacaatctat

SEQ ID NO: 1232 - DNA, 120 bp, synthetic construct
  source 1..120: mol_type = other DNA
tatagttttttttggtagatgtttagataagaggttacggataggtattgttttggtaatgtttagataaattaatttttttttgattttattgagaggttggataataatatagtttgt

SEQ ID NO: 1233 - DNA, 120 bp, synthetic construct
  source 1..120: mol_type = other DNA
aaattatacctctacttaaaatccttctcctataaaataaaataaaaactccttaacctaacataaaaactccaaactctacctatacaatctcacctatcacctatacctctatatact

SEQ ID NO: 1234 - DNA, 120 bp, synthetic construct
  source 1..120: mol_type = other DNA
aagttatgtttttgtttaaaattttttttttataggataagatggaaattttttagtttgatataaaagttttaggttttatttgtgtaattttatttgttatttatatttttgtatatt

SEQ ID NO: 1235 - DNA, 120 bp, synthetic construct
  source 1..120: mol_type = other DNA
aaattatacctctacttaaaatccttctcctataaaataaaataaaaactccttaacctacaataaaaactccaaactctacctatacaatctcacctatcacctatacctctatatact

SEQ ID NO: 1236 - DNA, 120 bp, synthetic construct
  source 1..120: mol_type = other DNA
aagttatgtttttgtttaaaattttttttttataggataagatggaaattttttagtttgtaataaaagttttaggttttatttgtgtaattttatttgttatttatatttttgtatatt

SEQ ID NO: 1237 - DNA, 120 bp, synthetic construct; identical to SEQ ID NO: 1233
  source 1..120: mol_type = other DNA

SEQ ID NO: 1238 - DNA, 120 bp, synthetic construct; identical to SEQ ID NO: 1234
  source 1..120: mol_type = other DNA

SEQ ID NO: 1239 - DNA, 120 bp, synthetic construct; identical to SEQ ID NO: 1235
  source 1..120: mol_type = other DNA

SEQ ID NO: 1240 - DNA, 120 bp, synthetic construct; identical to SEQ ID NO: 1236
  source 1..120: mol_type = other DNA

SEQ ID NO: 1241 - DNA, 120 bp, synthetic construct
  source 1..120: mol_type = other DNA
taatcaacctctaatataactaacatcttaaaataaaaaaaaaatatttaatttaaaaacaaatacttctacatttcacaaaataaaaatctataaataacaacatttaaaaattccttc

SEQ ID NO: 1242 - DNA, 120 bp, synthetic construct
  source 1..120: mol_type = other DNA
tggttaatttttgatgtagttgatattttgaaatgaggaaggaatgtttaatttgagaataggtatttttatattttataaggtagaaatttgtaaataataatatttggaagttttttt

SEQ ID NO: 1243 - DNA, 120 bp, synthetic construct
  source 1..120: mol_type = other DNA
taatcaacctctaatataactaacatcttaaaataaaaaaaaaatatttaatttaaaaacccatacttctacatttcacaaaataaaaatctataaataacaacatttaaaaattccttc

SEQ ID NO: 1244 - DNA, 120 bp, synthetic construct
  source 1..120: mol_type = other DNA
tggttaatttttgatgtagttgatattttgaaatgaggaaggaatgtttaatttgagaatttgtatttttatattttataaggtagaaatttgtaaataataatatttggaagttttttt

SEQ ID NO: 1245 - DNA, 120 bp, synthetic construct; identical to SEQ ID NO: 1241
  source 1..120: mol_type = other DNA

SEQ ID NO: 1246 - DNA, 120 bp, synthetic construct; identical to SEQ ID NO: 1242
  source 1..120: mol_type = other DNA

SEQ ID NO: 1247 - DNA, 120 bp, synthetic construct
  source 1..120: mol_type = other DNA
taatcaacctctaatataactaacatcttaaaataaaaaaaaaatatttaatttaaaaacccgtacttctacatttcacaaaataaaaatctataaataacaacatttaaaaattccttc

SEQ ID NO: 1248 - DNA, 120 bp, synthetic construct
  source 1..120: mol_type = other DNA
tggttaatttttgatgtagttgatattttgaaatgaggaaggaatgtttaatttgagaattcgtatttttatattttataaggtagaaatttgtaaataataatatttggaagttttttt

SEQ ID NO: 1249 - DNA, 120 bp, synthetic construct
  source 1..120: mol_type = other DNA
atataaaattctacatacatcaaaaaaaattctttaaatccacccaataaacacaattaacatacaactaaacaaactaaatacaataaatccacttcatcaatcctattaccctaaata

SEQ ID NO: 1250 - DNA, 120 bp, synthetic construct
  source 1..120: mol_type = other DNA
atatgaagttttatatgtgttaaagagggttttttgagtttgtttagtggatatggttagtgtgtggttgaataagttgaatgtaatggatttattttattagttttattgttttaaatg

SEQ ID NO: 1251 - DNA, 120 bp, synthetic construct
  source 1..120: mol_type = other DNA
atataaaattctacatacatcaaaaaaaattctttaaatccacccaataaacacaattaaactacaactaaacaaactaaatacaataaatccacttcatcaatcctattaccctaaata

SEQ ID NO: 1252 - DNA, 120 bp, synthetic construct
  source 1..120: mol_type = other DNA
atatgaagttttatatgtgttaaagagggttttttgagtttgtttagtggatatggttagattgtggttgaataagttgaatgtaatggatttattttattagttttattgttttaaatg

SEQ ID NO: 1253 - DNA, 120 bp, synthetic construct
  source 1..120: mol_type = other DNA
atataaaattctacatacgtcaaaaaaaattctttaaatccgcccaataaacacgattaacgtacgactaaacaaactaaatacaataaatccacttcatcaatcctattaccctaaata

SEQ ID NO: 1254 - DNA, 120 bp, synthetic construct
  source 1..120: mol_type = other DNA
atatgaagttttatatgcgttaaagagggttttttgagttcgtttagtggatacggttagcgtgcggttgaataagttgaatgtaatggatttattttattagttttattgttttaaatg

SEQ ID NO: 1255 - DNA, 120 bp, synthetic construct
  source 1..120: mol_type = other DNA
atataaaattctacatacgtcaaaaaaaattctttaaatccgcccaataaacacgattaaactacgactaaacaaactaaatacaataaatccacttcatcaatcctattaccctaaata

SEQ ID NO: 1256 - DNA, 120 bp, synthetic construct
  source 1..120: mol_type = other DNA
atatgaagttttatatgcgttaaagagggttttttgagttcgtttagtggatacggttagattgcggttgaataagttgaatgtaatggatttattttattagttttattgttttaaatg

SEQ ID NO: 1257 - DNA, 120 bp, synthetic construct
  source 1..120: mol_type = other DNA
aaaataacaaacctcaccctaacattcccataaaaataataaaaaccacattaaatactcaaactaatatctaacactctcaaacacatccaatcctcccctcaaaactctcttactttc

SEQ ID NO: 1258 - DNA, 120 bp, synthetic construct
  source 1..120: mol_type = other DNA
gaaatggtagattttattttggtatttttgtaaagatgataaaaattatattggatgtttagattggtatttaatatttttaaatatatttaattttttttttagggtttttttgttttt

SEQ ID NO: 1259 - DNA, 120 bp, synthetic construct
  source 1..120: mol_type = other DNA
aaaataacaaacctcaccctaacattcccataaaaataataaaaaccacattaaatactcccactaatatctaacactctcaaacacatccaatcctcccctcaaaactctcttactttc

SEQ ID NO: 1260 - DNA, 120 bp, synthetic construct
  source 1..120: mol_type = other DNA
gaaatggtagattttattttggtatttttgtaaagatgataaaaattatattggatgtttttattggtatttaatatttttaaatatatttaattttttttttagggtttttttgttttt

SEQ ID NO: 1261 - DNA, 120 bp, synthetic construct
  source 1..120: mol_type = other DNA
aaaataacaaacctcaccctaacattcccgtaaaaataataaaaaccacattaaatactcaaactaatatctaacactctcaaacacatccaatcctcccctcaaaactctcttactttc

SEQ ID NO: 1262 - DNA, 120 bp, synthetic construct
  source 1..120: mol_type = other DNA
gaaatggtagattttattttggtattttcgtaaagatgataaaaattatattggatgtttagattggtatttaatatttttaaatatatttaattttttttttagggtttttttgttttt

SEQ ID NO: 1263 - DNA, 120 bp, synthetic construct
  source 1..120: mol_type = other DNA
aaaataacaaacctcaccctaacattcccgtaaaaataataaaaaccacattaaatactcccactaatatctaacactctcaaacacatccaatcctcccctcaaaactctcttactttc

SEQ ID NO: 1264 - DNA, 120 bp, synthetic construct
  source 1..120: mol_type = other DNA
gaaatggtagattttattttggtattttcgtaaagatgataaaaattatattggatgtttttattggtatttaatatttttaaatatatttaattttttttttagggtttttttgttttt

SEQ ID NO: 1265 - DNA, 120 bp, synthetic construct
  source 1..120: mol_type = other DNA
ataaaacaaacacataccatttactaactaacataaacataaatacaaattaaactaattaacctaaaacaatccctccaaaaactaaaactaaattcaaatattcaaatttaaccaaaa

SEQ ID NO: 1266 - DNA, 120 bp, synthetic construct
  source 1..120: mol_type = other DNA
gtagagtagatatatattatttgttggttggtatggatataaatgtaagttggattgattaatttgaggtagtttttttaaaaattaggattagatttaagtatttaaatttaattggag

SEQ ID NO: 1267 - DNA, 120 bp, synthetic construct
  source 1..120: mol_type = other DNA
ataaaacaaacacataccatttactaactaacataaacataaatacaaattaaactaatttccctaaaacaatccctccaaaaactaaaactaaattcaaatattcaaatttaaccaaaa

SEQ ID NO: 1268 - DNA, 120 bp, synthetic construct
  source 1..120: mol_type = other DNA
gtagagtagatatatattatttgttggttggtatggatataaatgtaagttggattgatttttttgaggtagtttttttaaaaattaggattagatttaagtatttaaatttaattggag

SEQ ID NO: 1269 - DNA, 120 bp, synthetic construct
  source 1..120: mol_type = other DNA
ataaaacaaacacataccatttactaactaacataaacataaatacaaattaaactaattaacctaaaacaatccctccaaaaactaaaactaaattcaaatattcaaatttaaccgaaa

SEQ ID NO: 1270 - DNA, 120 bp, synthetic construct
  source 1..120: mol_type = other DNA
gtagagtagatatatattatttgttggttggtatggatataaatgtaagttggattgattaatttgaggtagtttttttaaaaattaggattagatttaagtatttaaatttaatcggag

SEQ ID NO: 1271 - DNA, 120 bp, synthetic construct
  source 1..120: mol_type = other DNA
ataaaacaaacacataccatttactaactaacataaacataaatacaaattaaactaatttccctaaaacaatccctccaaaaactaaaactaaattcaaatattcaaatttaaccgaaa

SEQ ID NO: 1272 - DNA, 120 bp, synthetic construct
  source 1..120: mol_type = other DNA
gtagagtagatatatattatttgttggttggtatggatataaatgtaagttggattgatttttttgaggtagtttttttaaaaattaggattagatttaagtatttaaatttaatcggag

SEQ ID NO: 1273 - DNA, 120 bp, synthetic construct
  source 1..120: mol_type = other DNA
caaactctattactctaaactaaaaacaaaccttaacaacactcctccttacccttaccaaaatatattaataaatcaaattataacaatcattttaccaataatatttacacctcccaa

SEQ ID NO: 1274 - DNA, 120 bp, synthetic construct
  source 1..120: mol_type = other DNA
taggttttattattttgggttgggagtaagttttggtgatatttttttttgtttttgttagaatatgttggtgaattaagttatgatagttattttattaataatatttatattttttaa

SEQ ID NO: 1275 - DNA, 120 bp, synthetic construct
  source 1..120: mol_type = other DNA
caaactctattactctaaactaaaaacaaaccttaacaacactcctccttacccttaccattatatattaataaatcaaattataacaatcattttaccaataatatttacacctcccaa

SEQ ID NO: 1276 - DNA, 120 bp, synthetic construct
  source 1..120: mol_type = other DNA
taggttttattattttgggttgggagtaagttttggtgatatttttttttgtttttgttattatatgttggtgaattaagttatgatagttattttattaataatatttatattttttaa

SEQ ID NO: 1277 - DNA, 120 bp, synthetic construct
  source 1..120: mol_type = other DNA
caaactctattactctaaactaaaaacaaaccttaacgacactcctccttacccttaccaaaatatattaataaatcaaattataacaatcattttaccaataatatttacacctcccaa

SEQ ID NO: 1278 - DNA, 120 bp, synthetic construct
  source 1..120: mol_type = other DNA
taggttttattattttgggttgggagtaagttttggcgatatttttttttgtttttgttagaatatgttggtgaattaagttatgatagttattttattaataatatttatattttttaa

SEQ ID NO: 1279 - DNA, 120 bp, synthetic construct
  source 1..120: mol_type = other DNA
caaactctattactctaaactaaaaacaaaccttaacgacactcctccttacccttaccattatatattaataaatcaaattataacaatcattttaccaataatatttacacctcccaa

SEQ ID NO: 1280 - DNA, 120 bp, synthetic construct
  source 1..120: mol_type = other DNA
taggttttattattttgggttgggagtaagttttggcgatatttttttttgtttttgttattatatgttggtgaattaagttatgatagttattttattaataatatttatattttttaa

SEQ ID NO: 1281 - DNA, 120 bp, synthetic construct
  source 1..120: mol_type = other DNA
aataaaatttatctcaataaaattatttccttcaattaacttcctcaacaataataaacctccaataatataataattttatactaataactaaaaatatattatcaactaatacctctt

SEQ ID NO: 1282 - DNA, 120 bp, synthetic construct
  source 1..120: mol_type = other DNA
aataaagtttgttttaataaaattattttttttaattagtttttttagtaatgatgagtttttggtaatgtaatgattttgtattaatagttgaaagtgtgttattagttaatgtttttt

SEQ ID NO: 1283 - DNA, 120 bp, synthetic construct
  source 1..120: mol_type = other DNA
aataaaatttatctcaataaaattatttccttcaattaacttcctcaacaataataaaccaacaataatataataattttatactaataactaaaaatatattatcaactaatacctctt

SEQ ID NO: 1284 - DNA, 120 bp, synthetic construct
  source 1..120: mol_type = other DNA
aataaagtttgttttaataaaattattttttttaattagtttttttagtaatgatgagttagtggtaatgtaatgattttgtattaatagttgaaagtgtgttattagttaatgtttttt

SEQ ID NO: 1285 - DNA, 120 bp, synthetic construct
  source 1..120: mol_type = other DNA
aataaaatttatctcaataaaattatttccttcaattaacttcctcaacaataataaacctccgataatataataattttatactaataactaaaaatatattatcaactaatacctctt

SEQ ID NO: 1286 - DNA, 120 bp, synthetic construct
  source 1..120: mol_type = other DNA
aataaagtttgttttaataaaattattttttttaattagtttttttagtaatgatgagttttcggtaatgtaatgattttgtattaatagttgaaagtgtgttattagttaatgtttttt

SEQ ID NO: 1287 - DNA, 120 bp, synthetic construct
  source 1..120: mol_type = other DNA
aataaaatttatctcaataaaattatttccttcaattaacttcctcaacaataataaaccaacgataatataataattttatactaataactaaaaatatattatcaactaatacctctt

SEQ ID NO: 1288 - DNA, 120 bp, synthetic construct
  source 1..120: mol_type = other DNA
aataaagtttgttttaataaaattattttttttaattagtttttttagtaatgatgagttagcggtaatgtaatgattttgtattaatagttgaaagtgtgttattagttaatgtttttt

SEQ ID NO: 1289 - DNA, 120 bp, synthetic construct
  source 1..120: mol_type = other DNA
cttcactttaaacataaacattaacatatacatttttttctctcaattctactataactatatcccaaaaatatttttatattctatttctatcttcattcatcttaaaatacatcctaa

SEQ ID NO: 1290 - DNA, 120 bp, synthetic construct
  source 1..120: mol_type = other DNA
ttttattttaaatataggtattaatatgtatattttttttttttagttttattatagttgtattttagaagtgtttttatgttttgtttttgtttttatttattttaaagtgtattttaa

SEQ ID NO: 1291 - DNA, 120 bp, synthetic construct
  source 1..120: mol_type = other DNA
cttcactttaaacataaacattaacatatacatttttttctctcaattctactataactaattcccaaaaatatttttatattctatttctatcttcattcatcttaaaatacatcctaa

SEQ ID NO: 1292 - DNA, 120 bp, synthetic construct
  source 1..120: mol_type = other DNA
ttttattttaaatataggtattaatatgtatattttttttttttagttttattatagttgatttttagaagtgtttttatgttttgtttttgtttttatttattttaaagtgtattttaa

SEQ ID NO: 1293 - DNA, 120 bp, synthetic construct; identical to SEQ ID NO: 1289
  source 1..120: mol_type = other DNA

SEQ ID NO: 1294 - DNA, 120 bp, synthetic construct; identical to SEQ ID NO: 1290
  source 1..120: mol_type = other DNA

SEQ ID NO: 1295 - DNA, 120 bp, synthetic construct; identical to SEQ ID NO: 1291
  source 1..120: mol_type = other DNA

SEQ ID NO: 1296 - DNA, 120 bp, synthetic construct; identical to SEQ ID NO: 1292
  source 1..120: mol_type = other DNA

SEQ ID NO: 1297 - DNA, 120 bp, synthetic construct
  source 1..120: mol_type = other DNA
ccccaattccactacaaaatttccttaatctcacctatcccaaatataaaaaatctcctcccacaatttacactaaaacaccaaaactacaacaatcaatatctcccttccccttcccct

SEQ ID NO: 1298 - DNA, 120 bp, synthetic construct
  source 1..120: mol_type = other DNA
ttttaattttattgtagggtttttttggttttatttgttttagatgtaaagggtttttttttgtaatttatgttaaagtattaaagttgtaatagttagtgttttttttttttttttttt

SEQ ID NO: 1299 - DNA, 120 bp, synthetic construct
  source 1..120: mol_type = other DNA
ccccaattccactacaaaatttccttaatctcacctatcccaaatataaaaaatctcctcaaacaatttacactaaaacaccaaaactacaacaatcaatatctcccttccccttcccct

SEQ ID NO: 1300 - DNA, 120 bp, synthetic construct
  source 1..120: mol_type = other DNA
ttttaattttattgtagggtttttttggttttatttgttttagatgtaaagggtttttttgggtaatttatgttaaagtattaaagttgtaatagttagtgttttttttttttttttttt

SEQ ID NO: 1301 - DNA, 120 bp, synthetic construct
  source 1..120: mol_type = other DNA
ccccaattccactacaaaatttccttaatctcacctatcccaaatataaaaaatctcctcccgcaatttacgctaaaacaccaaaactacaacaatcaatatctcccttccccttcccct

SEQ ID NO: 1302 - DNA, 120 bp, synthetic construct
  source 1..120: mol_type = other DNA
ttttaattttattgtagggtttttttggttttatttgttttagatgtaaagggttttttttcgtaatttacgttaaagtattaaagttgtaatagttagtgttttttttttttttttttt

SEQ ID NO: 1303 - DNA, 120 bp, synthetic construct
  source 1..120: mol_type = other DNA
ccccaattccactacaaaatttccttaatctcacctatcccaaatataaaaaatctcctcgaacaatttacgctaaaacaccaaaactacaacaatcaatatctcccttccccttcccct

SEQ ID NO: 1304 - DNA, 120 bp, synthetic construct
  source 1..120: mol_type = other DNA
ttttaattttattgtagggtttttttggttttatttgttttagatgtaaagggttttttcgggtaatttacgttaaagtattaaagttgtaatagttagtgttttttttttttttttttt

SEQ ID NO: 1305 - DNA, 120 bp, synthetic construct
  source 1..120: mol_type = other DNA
ttaccaactatattaccttaaataaatcccttaacctctctaaatctcatcacaaaatacttttcaaataaaacaaaatcattaaaaaaattcaataaaatatttactcttaaaaccctt

SEQ ID NO: 1306 - DNA, 120 bp, synthetic construct
  source 1..120: mol_type = other DNA
ttattagttgtgttattttaagtaggttttttaatttttttgaattttattgtaaagtgttttttgaatagagtaggattattgagaggatttagtgaagtatttatttttgaaattttt

SEQ ID NO: 1307 - DNA, 120 bp, synthetic construct
  source 1..120: mol_type = other DNA
ttaccaactatattaccttaaataaatcccttaacctctctaaatctcatcacaaaatacaattcaaataaaacaaaatcattaaaaaaattcaataaaatatttactcttaaaaccctt

SEQ ID NO: 1308 - DNA, 120 bp, synthetic construct
  source 1..120: mol_type = other DNA
ttattagttgtgttattttaagtaggttttttaatttttttgaattttattgtaaagtgtggtttgaatagagtaggattattgagaggatttagtgaagtatttatttttgaaattttt

SEQ ID NO: 1309 - DNA, 120 bp, synthetic construct
  source 1..120: mol_type = other DNA
ttaccaactatattaccttaaataaatcccttaacctctctaaatctcatcgcaaaatacttttcgaataaaacaaaatcattaaaaaaattcaataaaatatttactcttaaaaccctt

SEQ ID NO: 1310 - DNA, 120 bp, synthetic construct
  source 1..120: mol_type = other DNA
ttattagttgtgttattttaagtaggttttttaatttttttgaattttatcgtaaagtgtttttcgaatagagtaggattattgagaggatttagtgaagtatttatttttgaaattttt

SEQ ID NO: 1311 - DNA, 120 bp, synthetic construct
  source 1..120: mol_type = other DNA
ttaccaactatattaccttaaataaatcccttaacctctctaaatctcatcgcaaaatacgattcgaataaaacaaaatcattaaaaaaattcaataaaatatttactcttaaaaccctt

SEQ ID NO: 1312 - DNA, 120 bp, synthetic construct
  source 1..120: mol_type = other DNA
ttattagttgtgttattttaagtaggttttttaatttttttgaattttatcgtaaagtgcggttcgaatagagtaggattattgagaggatttagtgaagtatttatttttgaaattttt

SEQ ID NO: 1313 - DNA, 120 bp, synthetic construct
  source 1..120: mol_type = other DNA
ttattcttcaaataattaattatcttacaaatttaaatccacttataaaattactaaataactcaataccaaccatataataaatacacaacaaatatttttaaataaaataaaaaaata

SEQ ID NO: 1314 - DNA, 120 bp, synthetic construct
  source 1..120: mol_type = other DNA
ttgttttttaagtagttgattattttataaatttagatttatttatgaaattgttaagtagtttaatattagttgtgtagtagatatataataaatatttttaaatggaataaaagagtg

SEQ ID NO: 1315 - DNA, 120 bp, synthetic construct
  source 1..120: mol_type = other DNA
ttattcttcaaataattaattatcttacaaatttaaatccacttataaaattactaaatatatcaataccaaccatataataaatacacaacaaatatttttaaataaaataaaaaaata

SEQ ID NO: 1316 - DNA, 120 bp, synthetic construct
  source 1..120: mol_type = other DNA
ttgttttttaagtagttgattattttataaatttagatttatttatgaaattgttaagtatgttaatattagttgtgtagtagatatataataaatatttttaaatggaataaaagagtg

SEQ ID NO: 1317 - DNA, 120 bp, synthetic construct
  source 1..120: mol_type = other DNA
ttattcttcaaataattaattatcttacaaatttaaatccacttataaaattactaaataactcaataccaaccgtataataaatacacaacaaatatttttaaataaaataaaaaaata

SEQ ID NO: 1318 - DNA, 120 bp, synthetic construct
  source 1..120: mol_type = other DNA
ttgttttttaagtagttgattattttataaatttagatttatttatgaaattgttaagtagtttaatattagtcgtgtagtagatatataataaatatttttaaatggaataaaagagtg

SEQ ID NO: 1319 - DNA, 120 bp, synthetic construct
  source 1..120: mol_type = other DNA
ttattcttcaaataattaattatcttacaaatttaaatccacttataaaattactaaatatatcaataccaaccgtataataaatacacaacaaatatttttaaataaaataaaaaaata

SEQ ID NO: 1320 - DNA, 120 bp, synthetic construct
  source 1..120: mol_type = other DNA
ttgttttttaagtagttgattattttataaatttagatttatttatgaaattgttaagtatgttaatattagtcgtgtagtagatatataataaatatttttaaatggaataaaagagtg

SEQ ID NO: 1321 - DNA, 120 bp, synthetic construct
  source 1..120: mol_type = other DNA
aatcttcaaaaaatccataatccatttttaaataactcttatcttccaaaaatataaaatatacctacctaatactcttcctaaataaaaaaatattaccaaaaacatttaatcaactaa

SEQ ID NO: 1322 - DNA, 120 bp, synthetic construct
  source 1..120: mol_type = other DNA
aatttttgaagaatttgtagtttatttttaagtagtttttgttttttaaaggtatgggatgtgtttatttaatgttttttttggatgggagaatattattaaaaatgtttggttgattaa

SEQ ID NO: 1323 - DNA, 120 bp, synthetic construct
  source 1..120: mol_type = other DNA
aatcttcaaaaaatccataatccatttttaaataactcttatcttccaaaaatatacaatatacatacctaatactcttcctaaataaaaaaatattaccaaaaacatttaatcaactaa

SEQ ID NO: 1324 - DNA, 120 bp, synthetic construct
  source 1..120: mol_type = other DNA
aatttttgaagaatttgtagtttatttttaagtagtttttgttttttaaaggtatgtgatgtgtatatttaatgttttttttggatgggagaatattattaaaaatgtttggttgattaa

SEQ ID NO: 1325 - DNA, 120 bp, synthetic construct
  source 1..120: mol_type = other DNA
aatcttcgaaaaatccgtaatccatttttaaataactcttatcttccaaaaatataaaatatacctacctaatactcttcctaaataaaaaaatattaccaaaaacgtttaatcgactaa

SEQ ID NO: 1326 - DNA, 120 bp, synthetic construct
  source 1..120: mol_type = other DNA
aattttcgaagaattcgtagtttatttttaagtagtttttgttttttaaaggtatgggatgtgtttatttaatgttttttttggatgggagaatattattaaaaacgtttggtcgattaa

SEQ ID NO: 1327 - DNA, 120 bp, synthetic construct
  source 1..120: mol_type = other DNA
aatcttcgaaaaatccgtaatccatttttaaataactcttatcttccaaaaatatacgatatacatacctaatactcttcctaaataaaaaaatattaccaaaaacgtttaatcgactaa

SEQ ID NO: 1328 - DNA, 120 bp, synthetic construct
  source 1..120: mol_type = other DNA
aattttcgaagaattcgtagtttatttttaagtagtttttgttttttaaaggtatgcgatgtgtatatttaatgttttttttggatgggagaatattattaaaaacgtttggtcgattaa

SEQ ID NO: 1329 - DNA, 120 bp, synthetic construct
  source 1..120: mol_type = other DNA
tacttaaaaaacatatatattatttccaatttcttactctcatatacaaaactacaataattaacctaaaacatatatctttatatattaatcctactatctcttaaaaaaaatttaaaa

SEQ ID NO: 1330 - DNA, 120 bp, synthetic construct
  source 1..120: mol_type = other DNA
tgtttgaagaatatgtatattatttttaattttttatttttatatgtaaaattgtagtaattggtttagggtatatgtttttgtatattgattttattattttttaaagagaatttgaaa

SEQ ID NO: 1331 - DNA, 120 bp, synthetic construct
  source 1..120: mol_type = other DNA
tacttaaaaaacatatatattatttccaatttcttactctcatatacaaaactacactaattaaactaaaacatatatctttatatattaatcctactatctcttaaaaaaaatttaaaa

SEQ ID NO: 1332 - DNA, 120 bp, synthetic construct
  source 1..120: mol_type = other DNA
tgtttgaagaatatgtatattatttttaattttttatttttatatgtaaaattgtattaattggattagggtatatgtttttgtatattgattttattattttttaaagagaatttgaaa

SEQ ID NO: 1333 - DNA, 120 bp, synthetic construct; identical to SEQ ID NO: 1329
  source 1..120: mol_type = other DNA

SEQ ID NO: 1334 - DNA, 120 bp, synthetic construct; identical to SEQ ID NO: 1330
  source 1..120: mol_type = other DNA

SEQ ID NO: 1335 - DNA, 120 bp, synthetic construct; identical to SEQ ID NO: 1331
  source 1..120: mol_type = other DNA

SEQ ID NO: 1336 - DNA, 120 bp, synthetic construct; identical to SEQ ID NO: 1332
  source 1..120: mol_type = other DNA

SEQ ID NO: 1337 - DNA, 120 bp, synthetic construct
  source 1..120: mol_type = other DNA
aataaaaatacaatattataataaaacaaaatctcctattccattaacaactaaaaaaataacatttaaaattccttaatataaaacactattataatacataataataaatataaattt

SEQ ID NO: 1338 - DNA, 120 bp, synthetic construct
  source 1..120: mol_type = other DNA
ggtgaaaatgtaatattatagtagagtagggttttttgttttattggtaattagggggataatatttagggttttttgatataaaatattgttatgatgtatgatgatagatatgaattt

SEQ ID NO: 1339 - DNA, 120 bp, synthetic construct
  source 1..120: mol_type = other DNA
aataaaaatacaatattataataaaacaaaatctcctattccattaacaactaaaacaataacaattaaaattccttaatataaaacactattataatacataataataaatataaattt

SEQ ID NO: 1340 - DNA, 120 bp, synthetic construct
  source 1..120: mol_type = other DNA
ggtgaaaatgtaatattatagtagagtagggttttttgttttattggtaattagggtgataataattagggttttttgatataaaatattgttatgatgtatgatgatagatatgaattt

SEQ ID NO: 1341 - DNA, 120 bp, synthetic construct; identical to SEQ ID NO: 1337
  source 1..120: mol_type = other DNA

SEQ ID NO: 1342 - DNA, 120 bp, synthetic construct; identical to SEQ ID NO: 1338
  source 1..120: mol_type = other DNA

SEQ ID NO: 1343 - DNA, 120 bp, synthetic construct
  source 1..120: mol_type = other DNA
aataaaaatacaatattataataaaacaaaatctcctattccattaacaactaaaacgataacaattaaaattccttaatataaaacactattataatacataataataaatataaattt

SEQ ID NO: 1344 - DNA, 120 bp, synthetic construct
  source 1..120: mol_type = other DNA
ggtgaaaatgtaatattatagtagagtagggttttttgttttattggtaattagggcgataataattagggttttttgatataaaatattgttatgatgtatgatgatagatatgaattt

SEQ ID NO: 1345 - DNA, 120 bp, synthetic construct
  source 1..120: mol_type = other DNA
caaaactcaattacttaaaacaattccatttcccattactcacaatctacaaatcaaccaaacaatccttctaaactcaataaaaacttataccaccaactataacactacaaataactc

SEQ ID NO: 1346 - DNA, 120 bp, synthetic construct
  source 1..120: mol_type = other DNA
taaagtttaattgtttaaaataattttattttttattgtttatagtttgtagattagttgggtagtttttttggatttagtgggggtttgtgttattagttgtggtgttgtaggtggttt

SEQ ID NO: 1347 - DNA, 120 bp, synthetic construct
  source 1..120: mol_type = other DNA
caaaactcaattacttaaaacaattccatttcccattactcacaatctacaaatcaacctaaaaatccttctaaactcaataaaaacttataccaccaactataacactacaaataactc

SEQ ID NO: 1348 - DNA, 120 bp, synthetic construct
  source 1..120: mol_type = other DNA
taaagtttaattgtttaaaataattttattttttattgtttatagtttgtagattagtttggaagtttttttggatttagtgggggtttgtgttattagttgtggtgttgtaggtggttt

SEQ ID NO: 1349 - DNA, 120 bp, synthetic construct
  source 1..120: mol_type = other DNA
caaaactcaattacttaaaacaattccatttcccattactcacaatctacaaatcaaccgaacaatccttctaaactcaataaaaacttataccaccaactataacgctacaaataactc

SEQ ID NO: 1350 - DNA, 120 bp, synthetic construct
  source 1..120: mol_type = other DNA
taaagtttaattgtttaaaataattttattttttattgtttatagtttgtagattagtcgggtagtttttttggatttagtgggggtttgtgttattagttgtggcgttgtaggtggttt

SEQ ID NO: 1351 - DNA, 120 bp, synthetic construct
  source 1..120: mol_type = other DNA
caaaactcaattacttaaaacaattccatttcccattactcacaatctacaaatcaacctaaaaatccttctaaactcaataaaaacttataccaccaactataacgctacaaataactc

SEQ ID NO: 1352 - DNA, 120 bp, synthetic construct
  source 1..120: mol_type = other DNA
taaagtttaattgtttaaaataattttattttttattgtttatagtttgtagattagtttggaagtttttttggatttagtgggggtttgtgttattagttgtggcgttgtaggtggttt

SEQ ID NO: 1353 - DNA, 120 bp, synthetic construct
  source 1..120: mol_type = other DNA
aaaatataaatctttaaaaaaattaaataattatcttttatatattatctcttataaaactatcaaaaaaatatatacctaattaattcaaaacttaatactaataaacaataacttaat

SEQ ID NO: 1354 - DNA, 120 bp, synthetic construct
  source 1..120: mol_type = other DNA
aggatataagtttttgagaagattgaatagttattttttgtgtgttattttttgtgaggttattagaaagatgtatatttaattggtttaaagtttggtattgataaataatagtttgat

SEQ ID NO: 1355 - DNA, 120 bp, synthetic construct
  source 1..120: mol_type = other DNA
aaaatataaatctttaaaaaaattaaataattatcttttatatattatctcttataacactataaaaaaaatatatacctaattaattcaaaacttaatactaataaacaataacttaat

SEQ ID NO: 1356 - DNA, 120 bp, synthetic construct
  source 1..120: mol_type = other DNA
aggatataagtttttgagaagattgaatagttattttttgtgtgttattttttgtgatgttatgagaaagatgtatatttaattggtttaaagtttggtattgataaataatagtttgat

SEQ ID NO: 1357 - DNA, 120 bp, synthetic construct; identical to SEQ ID NO: 1353
  source 1..120: mol_type = other DNA

SEQ ID NO: 1358 - DNA, 120 bp, synthetic construct; identical to SEQ ID NO: 1354
  source 1..120: mol_type = other DNA

SEQ ID NO: 1359 - DNA, 120 bp, synthetic construct
  source 1..120: mol_type = other DNA
aaaatataaatctttaaaaaaattaaataattatcttttatatattatctcttataacgctataaaaaaaatatatacctaattaattcaaaacttaatactaataaacaataacttaat

SEQ ID NO: 1360 - DNA, 120 bp, synthetic construct
  source 1..120: mol_type = other DNA
aggatataagtttttgagaagattgaatagttattttttgtgtgttattttttgtgacgttatgagaaagatgtatatttaattggtttaaagtttggtattgataaataatagtttgat

SEQ ID NO: 1361 - DNA, 120 bp, synthetic construct
  source 1..120: mol_type = other DNA
cattaacttcctaaaccttaaaatcccacccaacctactacaaacaaaaataaaactaattctcccctaaaatataattcttccatatcaaaacaactcccaacccaaccaaaatataaa

SEQ ID NO: 1362 - DNA, 120 bp, synthetic construct
  source 1..120: mol_type = other DNA
tattggttttttagattttggggttttatttagtttgttgtaggtagaagtaaggttggtttttttttaagatatggtttttttatgttagggtagtttttagtttaattagggtgtaag

SEQ ID NO: 1363 - DNA, 120 bp, synthetic construct
  source 1..120: mol_type = other DNA
cattaacttcctaaaccttaaaatcccacccaacctactacaaacaaaaataaaactcattctaccctaaaatataattcttccatatcaaaacaactcccaacccaaccaaaatataaa

SEQ ID NO: 1364 - DNA, 120 bp, synthetic construct
  source 1..120: mol_type = other DNA
tattggttttttagattttggggttttatttagtttgttgtaggtagaagtaaggtttgttttattttaagatatggtttttttatgttagggtagtttttagtttaattagggtgtaag

SEQ ID NO: 1365 - DNA, 120 bp, synthetic construct; identical to SEQ ID NO: 1361
  source 1..120: mol_type = other DNA

SEQ ID NO: 1366 - DNA, 120 bp, synthetic construct; identical to SEQ ID NO: 1362
  source 1..120: mol_type = other DNA

SEQ ID NO: 1367 - DNA, 120 bp, synthetic construct
  source 1..120: mol_type = other DNA
cattaacttcctaaaccttaaaatcccacccaacctactacaaacaaaaataaaactcgttctaccctaaaatataattcttccatatcaaaacaactcccaacccaaccaaaatataaa

SEQ ID NO: 1368 - DNA, 120 bp, synthetic construct
  source 1..120: mol_type = other DNA
tattggttttttagattttggggttttatttagtttgttgtaggtagaagtaaggttcgttttattttaagatatggtttttttatgttagggtagtttttagtttaattagggtgtaag

SEQ ID NO: 1369 - DNA, 120 bp, synthetic construct
  source 1..120: mol_type = other DNA
aatattcttataaaaacattaaccctaaaataattaacaatattaaaaaaaaaattcataaacaacaaaaaacctaaaaattaacctttacctaaaacctaatctacatccaaaatttcc

SEQ ID NO: 1370 - DNA, 120 bp, synthetic construct
  source 1..120: mol_type = other DNA
agtgtttttatggagatattagttttggagtagttggtggtgttgggaggagggtttataagtagtggaaggtttggggattaatttttgtttaaagtttggtttatatttagggttttt

SEQ ID NO: 1371 - DNA, 120 bp, synthetic construct
  source 1..120: mol_type = other DNA
aatattcttataaaaacattaaccctaaaataattaacaatattaaaaaaaaaatacataaacaaaaaaaaacctaaaaattaacctttacctaaaacctaatctacatccaaaatttcc

SEQ ID NO: 1372 - DNA, 120 bp, synthetic construct
  source 1..120: mol_type = other DNA
agtgtttttatggagatattagttttggagtagttggtggtgttgggaggagggtgtataagtagaggaaggtttggggattaatttttgtttaaagtttggtttatatttagggttttt

SEQ ID NO: 1373 - DNA, 120 bp, synthetic construct
  source 1..120: mol_type = other DNA
aatattcttataaaaacattaaccctaaaataattaacgatattaaaaaaaaaattcataaacaacgaaaaacctaaaaattaacctttacctaaaacctaatctacatccaaaatttcc

SEQ ID NO: 1374 - DNA, 120 bp, synthetic construct
  source 1..120: mol_type = other DNA
agtgtttttatggagatattagttttggagtagttggcggtgttgggaggagggtttataagtagcggaaggtttggggattaatttttgtttaaagtttggtttatatttagggttttt

SEQ ID NO: 1375 - DNA, 120 bp, synthetic construct
  source 1..120: mol_type = other DNA
aatattcttataaaaacattaaccctaaaataattaacgatattaaaaaaaaaatacataaacaaaaaaaaacctaaaaattaacctttacctaaaacctaatctacatccaaaatttcc

SEQ ID NO: 1376 - DNA, 120 bp, synthetic construct
  source 1..120: mol_type = other DNA
agtgtttttatggagatattagttttggagtagttggcggtgttgggaggagggtgtataagtagaggaaggtttggggattaatttttgtttaaagtttggtttatatttagggttttt

SEQ ID NO: 1377 - DNA, 120 bp, synthetic construct
  source 1..120: mol_type = other DNA
atacccaaataaatttaaaaaaaactaacacaaaaaaaaactacaaaaataactaatacttatataaaaatcatttttcaattaaaacattaaaaaaaatataaaatttcttaatttaca

SEQ ID NO: 1378 - DNA, 120 bp, synthetic construct
  source 1..120: mol_type = other DNA
atgtttaggtggatttgggaagagttaatatagggaggagttatagaaatgattggtgtttgtgtagaaattattttttaattaaggtattaagggaaatatagagttttttgatttgta

SEQ ID NO: 1379 - DNA, 120 bp, synthetic construct
  source 1..120: mol_type = other DNA
atacccaaataaatttaaaaaaaactaacacaaaaaaaaactacaaaaataactaaaacttatattaaaatcatttttcaattaaaacattaaaaaaaatataaaatttcttaatttaca

SEQ ID NO: 1380 - DNA, 120 bp, synthetic construct
  source 1..120: mol_type = other DNA
atgtttaggtggatttgggaagagttaatatagggaggagttatagaaatgattggggtttgtgttgaaattattttttaattaaggtattaagggaaatatagagttttttgatttgta

SEQ ID NO: 1381 - DNA, 120 bp, synthetic construct; identical to SEQ ID NO: 1377
  source 1..120: mol_type = other DNA

SEQ ID NO: 1382 - DNA, 120 bp, synthetic construct; identical to SEQ ID NO: 1378
  source 1..120: mol_type = other DNA

SEQ ID NO: 1383 - DNA, 120 bp, synthetic construct; identical to SEQ ID NO: 1379
  source 1..120: mol_type = other DNA

SEQ ID NO: 1384 - DNA, 120 bp, synthetic construct; identical to SEQ ID NO: 1380
  source 1..120: mol_type = other DNA

SEQ ID NO: 1385 - DNA, 120 bp, synthetic construct
  source 1..120: mol_type = other DNA
ttataaaccacaatctaattaacctactccctacaaaataaataaactacttaaactttacccacttaaaacattacaaaataaaataatatatattttatttttttttccttattattt

SEQ ID NO: 1386 - DNA, 120 bp, synthetic construct
  source 1..120: mol_type = other DNA
ttgtggattgtagtttaattggtttgttttttgtagagtgagtgggttgtttagattttgtttatttgaggtgttgtgaaataggatggtgtgtgttttatttttttttttttgttattt

SEQ ID NO: 1387 - DNA, 120 bp, synthetic construct
  source 1..120: mol_type = other DNA
ttataaaccacaatctaattaacctactccctacaaaataaataaactacttaaacttaacccccttaaaacattacaaaataaaataatatatattttatttttttttccttattattt

SEQ ID NO: 1388 - DNA, 120 bp, synthetic construct
  source 1..120: mol_type = other DNA
ttgtggattgtagtttaattggtttgttttttgtagagtgagtgggttgtttagatttagtttttttgaggtgttgtgaaataggatggtgtgtgttttatttttttttttttgttattt

SEQ ID NO: 1389 - DNA, 120 bp, synthetic construct
  source 1..120: mol_type = other DNA
ttataaaccgcaatctaattaacctactccctacaaaataaataaactacttaaactttacccacttaaaacgttacgaaataaaataatatatattttatttttttttccttattattt

SEQ ID NO: 1390 - DNA, 120 bp, synthetic construct
  source 1..120: mol_type = other DNA
ttgtggatcgtagtttaattggtttgttttttgtagagtgagtgggttgtttagattttgtttatttgaggcgttgcgaaataggatggtgtgtgttttatttttttttttttgttattt

SEQ ID NO: 1391 - DNA, 120 bp, synthetic construct
  source 1..120: mol_type = other DNA
ttataaaccgcaatctaattaacctactccctacaaaataaataaactacttaaacttaacccccttaaaacgttacgaaataaaataatatatattttatttttttttccttattattt

SEQ ID NO: 1392 - DNA, 120 bp, synthetic construct
  source 1..120: mol_type = other DNA
ttgtggatcgtagtttaattggtttgttttttgtagagtgagtgggttgtttagatttagtttttttgaggcgttgcgaaataggatggtgtgtgttttatttttttttttttgttattt

SEQ ID NO: 1393 - DNA, 120 bp, synthetic construct
  source 1..120: mol_type = other DNA
ctttttcaatattaacacttataactttaccttattttatctactactactccttataaaaaattaaaaatatcttcatttaaaaacattttttaaaatattaattccataaacatataa

SEQ ID NO: 1394 - DNA, 120 bp, synthetic construct
  source 1..120: mol_type = other DNA
tttttttaatattgatatttgtaattttattttattttatttattgttgttttttgtaaggaattgagagtgtttttatttaaaaatattttttaaagtattagttttataaatatgtag

SEQ ID NO: 1395 - DNA, 120 bp, synthetic construct
  source 1..120: mol_type = other DNA
ctttttcaatattaacacttataactttaccttattttatctactactactccttttaaaaaatttaaaatatcttcatttaaaaacattttttaaaatattaattccataaacatataa

SEQ ID NO: 1396 - DNA, 120 bp, synthetic construct
  source 1..120: mol_type = other DNA
tttttttaatattgatatttgtaattttattttattttatttattgttgttttttttaaggaatttagagtgtttttatttaaaaatattttttaaagtattagttttataaatatgtag

SEQ ID NO: 1397 - DNA, 120 bp, synthetic construct; identical to SEQ ID NO: 1393
  source 1..120: mol_type = other DNA

SEQ ID NO: 1398 - DNA, 120 bp, synthetic construct; identical to SEQ ID NO: 1394
  source 1..120: mol_type = other DNA

SEQ ID NO: 1399 - DNA, 120 bp, synthetic construct; identical to SEQ ID NO: 1395
  source 1..120: mol_type = other DNA

SEQ ID NO: 1400 - DNA, 120 bp, synthetic construct; identical to SEQ ID NO: 1396
  source 1..120: mol_type = other DNA

SEQ ID NO: 1401 - DNA, 120 bp, synthetic construct
  source 1..120: mol_type = other DNA
tatatatctatccttttaaaactaaaacacttccaaaaaaaataatttcaacttctcaaaaaaatttaaaataatctaaacatctaacattttattttaaaactttcacctccaaactaa

SEQ ID NO: 1402 - DNA, 120 bp, synthetic construct
  source 1..120: mol_type = other DNA
tgtatatttgtttttttagaattagagtgtttttagaagggatgattttagttttttagaaaggtttagaatggtttaggtatttggtattttattttaagatttttatttttaggttgg

SEQ ID NO: 1403 - DNA, 120 bp, synthetic construct
  source 1..120: mol_type = other DNA
tatatatctatccttttaaaactaaaacacttccaaaaaaaataatttcaacttctaaaaaaaaattaaaataatctaaacatctaacattttattttaaaactttcacctccaaactaa

SEQ ID NO: 1404 - DNA, 120 bp, synthetic construct
  source 1..120: mol_type = other DNA
tgtatatttgtttttttagaattagagtgtttttagaagggatgattttagtttttaagaaaggattagaatggtttaggtatttggtattttattttaagatttttatttttaggttgg

SEQ ID NO: 1405 - DNA, 120 bp, synthetic construct
  source 1..120: mol_type = other DNA
tatatatctatccttttaaaactaaaacgcttccaaaaaaaataatttcaacttctcaaaaaaatttaaaataatctaaacatctaacattttattttaaaactttcacctccaaactaa

SEQ ID NO: 1406 - DNA, 120 bp, synthetic construct
  source 1..120: mol_type = other DNA
tgtatatttgtttttttagaattagagcgtttttagaagggatgattttagttttttagaaaggtttagaatggtttaggtatttggtattttattttaagatttttatttttaggttgg

SEQ ID NO: 1407 - DNA, 120 bp, synthetic construct
  source 1..120: mol_type = other DNA
tatatatctatccttttaaaactaaaacgcttccaaaaaaaataatttcaacttctaaaaaaaaattaaaataatctaaacatctaacattttattttaaaactttcacctccaaactaa

SEQ ID NO: 1408 - DNA, 120 bp, synthetic construct
  source 1..120: mol_type = other DNA
tgtatatttgtttttttagaattagagcgtttttagaagggatgattttagtttttaagaaaggattagaatggtttaggtatttggtattttattttaagatttttatttttaggttgg

SEQ ID NO: 1409 - DNA, 120 bp, synthetic construct
  source 1..120: mol_type = other DNA
ttctcaccaaaattaataacttataaataaaaaattactcaaattatcattactaaaacaataattataaccttcaatcttattaaaacaaaaaaaaatatctaaatttatatatataat

SEQ ID NO: 1410 - DNA, 120 bp, synthetic construct
  source 1..120: mol_type = other DNA
tttttattagggttagtaatttataagtgagaagttgtttagattattattattaggataataattatgatttttagttttattggagtaagagaaaatgtttaggtttatatatgtaat

SEQ ID NO: 1411 - DNA, 120 bp, synthetic construct
  source 1..120: mol_type = other DNA
ttctcaccaaaattaataacttataaataaaaaattactcaaattatcattactaacacaataaatataaccttcaatcttattaaaacaaaaaaaaatatctaaatttatatatataat

SEQ ID NO: 1412 - DNA, 120 bp, synthetic construct
  source 1..120: mol_type = other DNA
tttttattagggttagtaatttataagtgagaagttgtttagattattattattagtataataagtatgatttttagttttattggagtaagagaaaatgtttaggtttatatatgtaat

SEQ ID NO: 1413 - DNA, 120 bp, synthetic construct; identical to SEQ ID NO: 1409
  source 1..120: mol_type = other DNA

SEQ ID NO: 1414 - DNA, 120 bp, synthetic construct; identical to SEQ ID NO: 1410
  source 1..120: mol_type = other DNA

SEQ ID NO: 1415 - DNA, 120 bp, synthetic construct; identical to SEQ ID NO: 1411
  source 1..120: mol_type = other DNA

SEQ ID NO: 1416 - DNA, 120 bp, synthetic construct; identical to SEQ ID NO: 1412
  source 1..120: mol_type = other DNA

SEQ ID NO: 1417 - DNA, 120 bp, synthetic construct
  source 1..120: mol_type = other DNA
caataaaaaaaactaaaatacataaccatctttatcttctttttctcaaaataaattatttaacaataaacttctatccatttcttttaattaacattttataacttccaataaaactct

SEQ ID NO: 1418 - DNA, 120 bp, synthetic construct
  source 1..120: mol_type = other DNA
tagtgaggagggttgaaatgtgtagttgtttttgtttttttttttttagaatgagttatttggtaatgagtttttgtttattttttttaattggtattttgtgatttttagtaaggtttt

SEQ ID NO: 1419 - DNA, 120 bp, synthetic construct
  source 1..120: mol_type = other DNA
caataaaaaaaactaaaatacataaccatctttatcttctttttctcaaaataaataatttaacactaaacttctatccatttcttttaattaacattttataacttccaataaaactct

SEQ ID NO: 1420 - DNA, 120 bp, synthetic construct
  source 1..120: mol_type = other DNA
tagtgaggagggttgaaatgtgtagttgtttttgtttttttttttttagaatgagtgatttggtattgagtttttgtttattttttttaattggtattttgtgatttttagtaaggtttt

SEQ ID NO: 1421 - DNA, 120 bp, synthetic construct
  source 1..120: mol_type = other DNA
caataaaaaaaactaaaatacgtaaccgtctttatcttctttttctcaaaataaattatttaacaataaacttctatccatttcttttaattaacattttataacttccaataaaactct

SEQ ID NO: 1422 - DNA, 120 bp, synthetic construct
  source 1..120: mol_type = other DNA
tagtgaggagggttgaaatgcgtagtcgtttttgtttttttttttttagaatgagttatttggtaatgagtttttgtttattttttttaattggtattttgtgatttttagtaaggtttt

SEQ ID NO: 1423 - DNA, 120 bp, synthetic construct
  source 1..120: mol_type = other DNA
caataaaaaaaactaaaatacgtaaccgtctttatcttctttttctcaaaataaataatttaacactaaacttctatccatttcttttaattaacattttataacttccaataaaactct

SEQ ID NO: 1424 - DNA, 120 bp, synthetic construct
  source 1..120: mol_type = other DNA
tagtgaggagggttgaaatgcgtagtcgtttttgtttttttttttttagaatgagtgatttggtattgagtttttgtttattttttttaattggtattttgtgatttttagtaaggtttt

SEQ ID NO: 1425 - DNA, 120 bp, synthetic construct
  source 1..120: mol_type = other DNA
caaacaataaaaaaataacaataacaaaacaaattttaatcttaaacaaactaaaaccacttattcaatccacacaatttataaaaacatctccttaatacccccactatcctaaaattt

SEQ ID NO: 1426 - DNA, 120 bp, synthetic construct
  source 1..120: mol_type = other DNA
taagtaatgggggaatgatagtggtaggatagattttgattttggatagattgaggttatttatttagtttatatagtttatgggggtatttttttggtgtttttattgttttgggattt

SEQ ID NO: 1427 - DNA, 120 bp, synthetic construct
  source 1..120: mol_type = other DNA
caaacaataaaaaaataacaataacaaaacaaattttaatcttaaacaaactaaaaacacttattaaatccacacaatttataaaaacatctccttaatacccccactatcctaaaattt

SEQ ID NO: 1428 - DNA, 120 bp, synthetic construct
  source 1..120: mol_type = other DNA
taagtaatgggggaatgatagtggtaggatagattttgattttggatagattgagggtatttattgagtttatatagtttatgggggtatttttttggtgtttttattgttttgggattt

SEQ ID NO: 1429 - DNA, 120 bp, synthetic construct; identical to SEQ ID NO: 1425
  source 1..120: mol_type = other DNA

SEQ ID NO: 1430 - DNA, 120 bp, synthetic construct; identical to SEQ ID NO: 1426
  source 1..120: mol_type = other DNA

SEQ ID NO: 1431 - DNA, 120 bp, synthetic construct; identical to SEQ ID NO: 1427
  source 1..120: mol_type = other DNA

SEQ ID NO: 1432 - DNA, 120 bp, synthetic construct; identical to SEQ ID NO: 1428
  source 1..120: mol_type = other DNA

SEQ ID NO: 1433 - DNA, 120 bp, synthetic construct
  source 1..120: mol_type = other DNA
ttcataacatttttataataaataaatcaataaataaaatacatttaaaataatacctaatcataaaaatactaactattattaaatatcttattaaatattcaccaaaatataaaaatc

SEQ ID NO: 1434 - DNA, 120 bp, synthetic construct
  source 1..120: mol_type = other DNA
tttataatatttttgtgataagtaaattaataagtaaaatgtatttagaatagtgtttggttatagagatattggttgttattaaatattttattaaatatttattaagatataaaaatt

SEQ ID NO: 1435 - DNA, 120 bp, synthetic construct
  source 1..120: mol_type = other DNA
ttcataacatttttataataaataaatcaataaataaaatacatttaaaataatacctattaataaaaatactaactattattaaatatcttattaaatattcaccaaaatataaaaatc

SEQ ID NO: 1436 - DNA, 120 bp, synthetic construct
  source 1..120: mol_type = other DNA
tttataatatttttgtgataagtaaattaataagtaaaatgtatttagaatagtgtttgttaatagagatattggttgttattaaatattttattaaatatttattaagatataaaaatt

SEQ ID NO: 1437 - DNA, 120 bp, synthetic construct; identical to SEQ ID NO: 1433
  source 1..120: mol_type = other DNA

SEQ ID NO: 1438 - DNA, 120 bp, synthetic construct; identical to SEQ ID NO: 1434
  source 1..120: mol_type = other DNA

SEQ ID NO: 1439 - DNA, 120 bp, synthetic construct; identical to SEQ ID NO: 1435
  source 1..120: mol_type = other DNA

SEQ ID NO: 1440 - DNA, 120 bp, synthetic construct; identical to SEQ ID NO: 1436
  source 1..120: mol_type = other DNA

SEQ ID NO: 1441 - DNA, 120 bp, synthetic construct
  source 1..120: mol_type = other DNA
aaaataaaataatattcattaataacttctctacaattaacttactataacattataaaaaaattacacattattaaaaaaaataaatttctaaaaacaattacaaaaaaacaacaaact

SEQ ID NO: 1442 - DNA, 120 bp, synthetic construct
  source 1..120: mol_type = other DNA
aaagtaaaataatatttattagtgatttttttatagttaatttattatggtattatgaagaaattgtatgttgttaaagaaagtgaatttttaaaagtagttatagaaaggtaataagtt

SEQ ID NO: 1443 - DNA, 120 bp, synthetic construct
  source 1..120: mol_type = other DNA
aaaataaaataatattcattaataacttctctacaattaacttactataacattatacaaaaaatacacattattaaaaaaaataaatttctaaaaacaattacaaaaaaacaacaaact

SEQ ID NO: 1444 - DNA, 120 bp, synthetic construct
  source 1..120: mol_type = other DNA
aaagtaaaataatatttattagtgatttttttatagttaatttattatggtattatgtagaaaatgtatgttgttaaagaaagtgaatttttaaaagtagttatagaaaggtaataagtt

SEQ ID NO: 1445 - DNA, 120 bp, synthetic construct
  source 1..120: mol_type = other DNA
aaaataaaataatattcattaataacttctctacaattaacttactataacattataaaaaaattacacgttattaaaaaaaataaatttctaaaaacaattacaaaaaaacaacaaact

SEQ ID NO: 1446 - DNA, 120 bp, synthetic construct
  source 1..120: mol_type = other DNA
aaagtaaaataatatttattagtgatttttttatagttaatttattatggtattatgaagaaattgtacgttgttaaagaaagtgaatttttaaaagtagttatagaaaggtaataagtt

SEQ ID NO: 1447 - DNA, 120 bp, synthetic construct
  source 1..120: mol_type = other DNA
aaaataaaataatattcattaataacttctctacaattaacttactataacattatacaaaaaatacacgttattaaaaaaaataaatttctaaaaacaattacaaaaaaacaacaaact

SEQ ID NO: 1448 - DNA, 120 bp, synthetic construct
  source 1..120: mol_type = other DNA
aaagtaaaataatatttattagtgatttttttatagttaatttattatggtattatgtagaaaatgtacgttgttaaagaaagtgaatttttaaaagtagttatagaaaggtaataagtt

SEQ ID NO: 1449 - DNA, 120 bp, synthetic construct
  source 1..120: mol_type = other DNA
aaaatcatctacccaatctactctttaatctaataataacacctaaaacacaaatatcctatcaaattcaaaattataaatatacccaccccaaaaatatttttaaaataactccctaaa

SEQ ID NO: 1450 - DNA, 120 bp, synthetic construct
  source 1..120: mol_type = other DNA
agaattatttatttagtttgttttttggtttaataatggtatttagaatataaatattttgttaaatttagagttatggatgtgtttattttaaaggtatttttggaataattttttgga

SEQ ID NO: 1451 - DNA, 120 bp, synthetic construct
  source 1..120: mol_type = other DNA
aaaatcatctacccaatctactctttaatctaataataacacctaaaacacaaatctcctatcaatttcaaaattataaatatacccaccccaaaaatatttttaaaataactccctaaa

SEQ ID NO: 1452 - DNA, 120 bp, synthetic construct
  source 1..120: mol_type = other DNA
agaattatttatttagtttgttttttggtttaataatggtatttagaatataaattttttgttaattttagagttatggatgtgtttattttaaaggtatttttggaataattttttgga

SEQ ID NO: 1453 - DNA, 120 bp, synthetic construct; identical to SEQ ID NO: 1449
  source 1..120: mol_type = other DNA

SEQ ID NO: 1454 - DNA, 120 bp, synthetic construct; identical to SEQ ID NO: 1450
  source 1..120: mol_type = other DNA

SEQ ID NO: 1455 - DNA, 120 bp, synthetic construct; identical to SEQ ID NO: 1451
  source 1..120: mol_type = other DNA

SEQ ID NO: 1456 - DNA, 120 bp, synthetic construct; identical to SEQ ID NO: 1452
  source 1..120: mol_type = other DNA

SEQ ID NO: 1457 - DNA, 120 bp, synthetic construct
  source 1..120: mol_type = other DNA
ttccatacttaaaaaaaacttaaaaaaaccccaaacctaaactaaaaacaataatcttaaccaacaattttctaacttccccttactattattaaatatccttctatttaaataaaaatt

SEQ ID NO: 1458 - DNA, 120 bp, synthetic construct
  source 1..120: mol_type = other DNA
ttttatgtttgaggaagatttggaaaaattttagatttaaattaaaagtagtgattttggttagtaattttttggtttttttttgttattattaagtatttttttgtttgagtaagaatt

SEQ ID NO: 1459 - DNA, 120 bp, synthetic construct
  source 1..120: mol_type = other DNA
ttccatacttaaaaaaaacttaaaaaaaccccaaacctaaactaaaaacaataatcttaaaaaacaattttctaacttccccttactattattaaatatccttctatttaaataaaaatt

SEQ ID NO: 1460 - DNA, 120 bp, synthetic construct
  source 1..120: mol_type = other DNA
ttttatgtttgaggaagatttggaaaaattttagatttaaattaaaagtagtgattttggaaagtaattttttggtttttttttgttattattaagtatttttttgtttgagtaagaatt

SEQ ID NO: 1461 - DNA, 120 bp, synthetic construct; identical to SEQ ID NO: 1457
  source 1..120: mol_type = other DNA

SEQ ID NO: 1462 - DNA, 120 bp, synthetic construct; identical to SEQ ID NO: 1458
  source 1..120: mol_type = other DNA

SEQ ID NO: 1463 - DNA, 120 bp, synthetic construct; identical to SEQ ID NO: 1459
  source 1..120: mol_type = other DNA

SEQ ID NO: 1464 - DNA, 120 bp, synthetic construct; identical to SEQ ID NO: 1460
  source 1..120: mol_type = other DNA

SEQ ID NO: 1465 - DNA, 120 bp, synthetic construct
  source 1..120: mol_type = other DNA
aaaaaaaaaaactctaaaccctaaaaaataactaaacataattatcaaacctcacaattaaaactataaaaaaccccaaactataacttttaaaaatttactaattcaaaatataaaact

SEQ ID NO: 1466 - DNA, 120 bp, synthetic construct
  source 1..120: mol_type = other DNA
aggggagagggttttgagttttagagggtgattgggtgtgattattaggttttatagttagagttgtggaaggttttgggttgtggtttttgggaatttgttggtttagggtgtggagtt

SEQ ID NO: 1467 - DNA, 120 bp, synthetic construct
  source 1..120: mol_type = other DNA
aaaaaaaaaaactctaaaccctaaaaaataactaaacataattatcaaacctcacaattattactataaaaaaccccaaactataacttttaaaaatttactaattcaaaatataaaact

SEQ ID NO: 1468 - DNA, 120 bp, synthetic construct
  source 1..120: mol_type = other DNA
aggggagagggttttgagttttagagggtgattgggtgtgattattaggttttatagttattgttgtggaaggttttgggttgtggtttttgggaatttgttggtttagggtgtggagtt

SEQ ID NO: 1469 - DNA, 120 bp, synthetic construct
  source 1..120: mol_type = other DNA
aaaaaaaaaaactctaaaccctaaaaaataactaaacgtaattatcaaacctcacaattaaaactataaaaaaccccgaactataacttttaaaaatttactaattcaaaatataaaact

SEQ ID NO: 1470 - DNA, 120 bp, synthetic construct
  source 1..120: mol_type = other DNA
aggggagagggttttgagttttagagggtgattgggcgtgattattaggttttatagttagagttgtggaaggtttcgggttgtggtttttgggaatttgttggtttagggtgtggagtt

SEQ ID NO: 1471 - DNA, 120 bp, synthetic construct
  source 1..120: mol_type = other DNA
aaaaaaaaaaactctaaaccctaaaaaataactaaacgtaattatcaaacctcacaattattactataaaaaaccccgaactataacttttaaaaatttactaattcaaaatataaaact

SEQ ID NO: 1472 - DNA, 120 bp, synthetic construct
  source 1..120: mol_type = other DNA
aggggagagggttttgagttttagagggtgattgggcgtgattattaggttttatagttattgttgtggaaggtttcgggttgtggtttttgggaatttgttggtttagggtgtggagtt

SEQ ID NO: 1473 - DNA, 120 bp, synthetic construct
  source 1..120: mol_type = other DNA
tccctccaacaaccctaactaaaaacctctaaactctactacaaaactacacacaccttacaaaaactacatacaccccaatacatcatcaaaaccaaaaaacacatccttaccacttaa

SEQ ID NO: 1474 - DNA, 120 bp, synthetic construct
  source 1..120: mol_type = other DNA
tttttttagtagttttggttggaaatttttaggttttgttgtaaaattgtatatattttgtgggagttatgtgtattttagtatattattagaattagggagtatatttttgttatttgg

SEQ ID NO: 1475 - DNA, 120 bp, synthetic construct
  source 1..120: mol_type = other DNA
tccctccaacaaccctaactaaaaacctctaaactctactacaaaactacacacaccttaacaaaactacatacaccccaatacatcatcaaaaccaaaaaacacatccttaccacttaa

SEQ ID NO: 1476 - DNA, 120 bp, synthetic construct
  source 1..120: mol_type = other DNA
tttttttagtagttttggttggaaatttttaggttttgttgtaaaattgtatatattttgatggagttatgtgtattttagtatattattagaattagggagtatatttttgttatttgg

SEQ ID NO: 1477 - DNA, 120 bp, synthetic construct
  source 1..120: mol_type = other DNA
tccctccaacaaccctaactaaaaacctctaaactctactacaaaactacacacaccttacgaaaactacgtacaccccaatacatcatcaaaaccaaaaaacacatccttaccacttaa

SEQ ID NO: 1478 - DNA, 120 bp, synthetic construct
  source 1..120: mol_type = other DNA
tttttttagtagttttggttggaaatttttaggttttgttgtaaaattgtatatattttgcgggagttacgtgtattttagtatattattagaattagggagtatatttttgttatttgg

SEQ ID NO: 1479 - DNA, 120 bp, synthetic construct
  source 1..120: mol_type = other DNA
tccctccaacaaccctaactaaaaacctctaaactctactacaaaactacacacaccttaacgaaactacgtacaccccaatacatcatcaaaaccaaaaaacacatccttaccacttaa

SEQ ID NO: 1480 - DNA, 120 bp, synthetic construct
  source 1..120: mol_type = other DNA
tttttttagtagttttggttggaaatttttaggttttgttgtaaaattgtatatattttgacggagttacgtgtattttagtatattattagaattagggagtatatttttgttatttgg

SEQ ID NO: 1481 - DNA, 120 bp, synthetic construct
  source 1..120: mol_type = other DNA
tataactttctctatacctatttctataaatataaaaatctctaacatacctcactattatattcccaaaatctatatattatcaaattaaattaaaacattaaaatttcccaaaaccct

SEQ ID NO: 1482 - DNA, 120 bp, synthetic construct
  source 1..120: mol_type = other DNA
tgtgattttttttgtatttgtttttgtgggtgtgaagatttttaatatgttttattattgtatttttagggtttatgtgttattagattaaattgaagtattggagttttttaaagtttt

SEQ ID NO: 1483 - DNA, 120 bp, synthetic construct
  source 1..120: mol_type = other DNA
tataactttctctatacctatttctataaatataaaaatctctaacatacctcactattaatttcccaaaatctatatattatcaaattaaattaaaacattaaaatttcccaaaaccct

SEQ ID NO: 1484 - DNA, 120 bp, synthetic construct
  source 1..120: mol_type = other DNA
tgtgattttttttgtatttgtttttgtgggtgtgaagatttttaatatgttttattattggttttttagggtttatgtgttattagattaaattgaagtattggagttttttaaagtttt

SEQ ID NO: 1485 - DNA, 120 bp, synthetic construct; identical to SEQ ID NO: 1481
  source 1..120: mol_type = other DNA

SEQ ID NO: 1486 - DNA, 120 bp, synthetic construct; identical to SEQ ID NO: 1482
  source 1..120: mol_type = other DNA

SEQ ID NO: 1487 - DNA, 120 bp, synthetic construct; identical to SEQ ID NO: 1483
  source 1..120: mol_type = other DNA

SEQ ID NO: 1488 - DNA, 120 bp, synthetic construct; identical to SEQ ID NO: 1484
  source 1..120: mol_type = other DNA

SEQ ID NO: 1489 - DNA, 120 bp, synthetic construct
  source 1..120: mol_type = other DNA
ttttaaaaaaaataatacataattaaccaaaacaaccttcaaatccaaaataaaaaaaccaaatattcttaatcatacaacaactcaaattaaaacattctaccacctccttaatcaaca

SEQ ID NO: 1490 - DNA, 120 bp, synthetic construct
  source 1..120: mol_type = other DNA
ttttgaggaaaataatatataattagttagggtaatttttaagtttaaaatgaaaaggttagatatttttaattatataataatttagattagagtattttattatttttttggttaata

SEQ ID NO: 1491 - DNA, 120 bp, synthetic construct
  source 1..120: mol_type = other DNA
ttttaaaaaaaataatacataattaaccaaaacaaccttcaaatccaaaataaaaaaaccccatattcttaatcatacaacaactcaaattaaaacattctaccacctccttaatcaaca

SEQ ID NO: 1492 - DNA, 120 bp, synthetic construct
  source 1..120: mol_type = other DNA
ttttgaggaaaataatatataattagttagggtaatttttaagtttaaaatgaaaaggttttatatttttaattatataataatttagattagagtattttattatttttttggttaata

SEQ ID NO: 1493 - DNA, 120 bp, synthetic construct; identical to SEQ ID NO: 1489
  source 1..120: mol_type = other DNA

SEQ ID NO: 1494 - DNA, 120 bp, synthetic construct; identical to SEQ ID NO: 1490
  source 1..120: mol_type = other DNA

SEQ ID NO: 1495 - DNA, 120 bp, synthetic construct; identical to SEQ ID NO: 1491
  source 1..120: mol_type = other DNA

SEQ ID NO: 1496 - DNA, 120 bp, synthetic construct; identical to SEQ ID NO: 1492
  source 1..120: mol_type = other DNA

SEQ ID NO: 1497 - DNA, 120 bp, synthetic construct
  source 1..120: mol_type = other DNA
aaataaataaaataacactaaattcattttaacctaaattaatacaaataaaataaaatacataacctactaattatctataaaaaacaaacctataaaatatcaaatattatcactact

SEQ ID NO: 1498 - DNA, 120 bp, synthetic construct
  source 1..120: mol_type = other DNA
aaataagtgaagtaatattagatttattttaatttgaattaatataaataaggtgaaatgtatggtttattgattgtttataaggagtaaatttataaaatattaagtattgttattgtt

SEQ ID NO: 1499 - DNA, 120 bp, synthetic construct
  source 1..120: mol_type = other DNA
aaataaataaaataacactaaattcattttaacctaaattaatacaaataaaataaaataattaacctactaattatctataaaaaacaaacctataaaatatcaaatattatcactact

SEQ ID NO: 1500 - DNA, 120 bp, synthetic construct
  source 1..120: mol_type = other DNA
aaataagtgaagtaatattagatttattttaatttgaattaatataaataaggtgaaatggttggtttattgattgtttataaggagtaaatttataaaatattaagtattgttattgtt

SEQ ID NO: 1501 - DNA, 120 bp, synthetic construct; identical to SEQ ID NO: 1497
  source 1..120: mol_type = other DNA

SEQ ID NO: 1502 - DNA, 120 bp, synthetic construct; identical to SEQ ID NO: 1498
  source 1..120: mol_type = other DNA

SEQ ID NO: 1503 - DNA, 120 bp, synthetic construct; identical to SEQ ID NO: 1499
  source 1..120: mol_type = other DNA

SEQ ID NO: 1504 - DNA, 120 bp, synthetic construct; identical to SEQ ID NO: 1500
  source 1..120: mol_type = other DNA

SEQ ID NO: 1505 - DNA, 120 bp, synthetic construct
  source 1..120: mol_type = other DNA
taaaaaccacaaaaaaacttaattttataatctaataattctcaaaaattaaaatacttcaaaatcacttaaccaatttatcaaaacacaaattcctaaatcccacccccaaaatttata

SEQ ID NO: 1506 - DNA, 120 bp, synthetic construct
  source 1..120: mol_type = other DNA
tagaggttataaaggagtttaattttgtaatttagtgatttttaaaggttagaatgttttagaattatttggttagtttgttgaagtatagatttttgggttttatttttagagtttatg

SEQ ID NO: 1507 - DNA, 120 bp, synthetic construct
  source 1..120: mol_type = other DNA
taaaaaccacaaaaaaacttaattttataatctaataattctcaaaaattaaaatacttctcaatcacttaaccaatttatcaaaacacaaattcctaaatcccacccccaaaatttata

SEQ ID NO: 1508 - DNA, 120 bp, synthetic construct
  source 1..120: mol_type = other DNA
tagaggttataaaggagtttaattttgtaatttagtgatttttaaaggttagaatgttttttaattatttggttagtttgttgaagtatagatttttgggttttatttttagagtttatg

SEQ ID NO: 1509 - DNA, 120 bp, synthetic construct
  source 1..120: mol_type = other DNA
taaaaaccacaaaaaaacttaattttataatctaataattctcaaaaattaaaatacttcaaaatcacttaaccaatttatcgaaacacaaattcctaaatcccacccccaaaatttata

SEQ ID NO: 1510 - DNA, 120 bp, synthetic construct
  source 1..120: mol_type = other DNA
tagaggttataaaggagtttaattttgtaatttagtgatttttaaaggttagaatgttttagaattatttggttagtttgtcgaagtatagatttttgggttttatttttagagtttatg

SEQ ID NO: 1511 - DNA, 120 bp, synthetic construct
  source 1..120: mol_type = other DNA
taaaaaccacaaaaaaacttaattttataatctaataattctcaaaaattaaaatacttctcaatcacttaaccaatttatcgaaacacaaattcctaaatcccacccccaaaatttata

SEQ ID NO: 1512 - DNA, 120 bp, synthetic construct
  source 1..120: mol_type = other DNA
tagaggttataaaggagtttaattttgtaatttagtgatttttaaaggttagaatgttttttaattatttggttagtttgtcgaagtatagatttttgggttttatttttagagtttatg

SEQ ID NO: 1513 - DNA, 120 bp, synthetic construct
  source 1..120: mol_type = other DNA
ccaaaaccaataaaaaaaacacacatttacttataaattaaaaatcaaatatatctttctttaacccaatactaacacacatttacatcctccccactatatattattcactaataacaa

SEQ ID NO: 1514 - DNA, 120 bp, synthetic construct
  source 1..120: mol_type = other DNA
ttagaattgatgagaggggtatatatttatttgtgaattaagaattaaatgtatttttttttggtttagtattgatatatatttatattttttttattgtgtgttgtttattagtagtaa

SEQ ID NO: 1515 - DNA, 120 bp, synthetic construct
  source 1..120: mol_type = other DNA
ccaaaaccaataaaaaaaacacacatttacttataaattaaaaatcaaatatatctttctaaaacccaatactaacacacatttacatcctccccactatatattattcactaataacaa

SEQ ID NO: 1516 - DNA, 120 bp, synthetic construct
  source 1..120: mol_type = other DNA
ttagaattgatgagaggggtatatatttatttgtgaattaagaattaaatgtatttttttggggtttagtattgatatatatttatattttttttattgtgtgttgtttattagtagtaa

SEQ ID NO: 1517 - DNA, 120 bp, synthetic construct
  source 1..120: mol_type = other DNA
ccaaaaccgataaaaaaaacacacatttacttataaattaaaaatcaaatatatctttctttaacccaatactaacacacatttacatcctccccactatatattattcactaataacaa

SEQ ID NO: 1518 - DNA, 120 bp, synthetic construct
  source 1..120: mol_type = other DNA
ttagaatcgatgagaggggtatatatttatttgtgaattaagaattaaatgtatttttttttggtttagtattgatatatatttatattttttttattgtgtgttgtttattagtagtaa

SEQ ID NO: 1519 - DNA, 120 bp, synthetic construct
  source 1..120: mol_type = other DNA
ccaaaaccgataaaaaaaacacacatttacttataaattaaaaatcaaatatatctttctaaaacccaatactaacacacatttacatcctccccactatatattattcactaataacaa

SEQ ID NO: 1520 - DNA, 120 bp, synthetic construct
  source 1..120: mol_type = other DNA
ttagaatcgatgagaggggtatatatttatttgtgaattaagaattaaatgtatttttttggggtttagtattgatatatatttatattttttttattgtgtgttgtttattagtagtaa

SEQ ID NO: 1521 - DNA, 120 bp, synthetic construct
  source 1..120: mol_type = other DNA
aaaaaccaaaaaaatatcaacctaacctcaaactttttctcccatccccaaataaatattcttcacaccctactaaaaaccaaaaaacctaaaaaccctatttaattaatcatactacaa

SEQ ID NO: 1522 - DNA, 120 bp, synthetic construct
  source 1..120: mol_type = other DNA
agaagttaggagaatattagtttaattttaaatttttttttttatttttagatgggtgttttttatattttattggaagttagagagtttaggaattttgtttaattaattatattatag

SEQ ID NO: 1523 - DNA, 120 bp, synthetic construct
  source 1..120: mol_type = other DNA
aaaaaccaaaaaaatatcaacctaacctcaaactttttctcccatccccaaataaatattaatcacaccctactaaaaaccaaaaaacctaaaaaccctatttaattaatcatactacaa

SEQ ID NO: 1524 - DNA, 120 bp, synthetic construct
  source 1..120: mol_type = other DNA
agaagttaggagaatattagtttaattttaaatttttttttttatttttagatgggtgttggttatattttattggaagttagagagtttaggaattttgtttaattaattatattatag

SEQ ID NO: 1525 - DNA, 120 bp, synthetic construct; identical to SEQ ID NO: 1521
  source 1..120: mol_type = other DNA

SEQ ID NO: 1526 - DNA, 120 bp, synthetic construct; identical to SEQ ID NO: 1522
  source 1..120: mol_type = other DNA

SEQ ID NO: 1527 - DNA, 120 bp, synthetic construct; identical to SEQ ID NO: 1523
  source 1..120: mol_type = other DNA

SEQ ID NO: 1528 - DNA, 120 bp, synthetic construct; identical to SEQ ID NO: 1524
  source 1..120: mol_type = other DNA

SEQ ID NO: 1529 - DNA, 120 bp, synthetic construct
  source 1..120: mol_type = other DNA
tcaaaaacaaacaaactattaaaaaaaaatattttcaataaacataattattaccaaatttctaaccttaacatattaaaaaatactcacaataaatttttaaaaactaatattacaaaa

SEQ ID NO: 1530 - DNA, 120 bp, synthetic construct
  source 1..120: mol_type = other DNA
ttaaaggtagataaattattgggggaaaatatttttagtaaatatgattgttattaagtttttagttttgatatattaaaaaatatttataatagatttttaaagattaatattatagga

SEQ ID NO: 1531 - DNA, 120 bp, synthetic construct
  source 1..120: mol_type = other DNA
tcaaaaacaaacaaactattaaaaaaaaatattttcaataaacataattattaccaaattaataaccttaacatattaaaaaatactcacaataaatttttaaaaactaatattacaaaa

SEQ ID NO: 1532 - DNA, 120 bp, synthetic construct
  source 1..120: mol_type = other DNA
ttaaaggtagataaattattgggggaaaatatttttagtaaatatgattgttattaagttgatagttttgatatattaaaaaatatttataatagatttttaaagattaatattatagga

SEQ ID NO: 1533 - DNA, 120 bp, synthetic construct; identical to SEQ ID NO: 1529
  source 1..120: mol_type = other DNA

SEQ ID NO: 1534 - DNA, 120 bp, synthetic construct; identical to SEQ ID NO: 1530
  source 1..120: mol_type = other DNA

SEQ ID NO: 1535 - DNA, 120 bp, synthetic construct; identical to SEQ ID NO: 1531
  source 1..120: mol_type = other DNA

SEQ ID NO: 1536 - DNA, 120 bp, synthetic construct; identical to SEQ ID NO: 1532
  source 1..120: mol_type = other DNA

SEQ ID NO: 1537 - DNA, 120 bp, synthetic construct
  source 1..120: mol_type = other DNA
cactaatacaccaacttataaaaataacccaaaacatacaactaaactttttaaatctatcattatctcacctaaactaatattcaaaatctccttaacattttattaacatccaaaaac

SEQ ID NO: 1538 - DNA, 120 bp, synthetic construct
  source 1..120: mol_type = other DNA
tattaatatattggtttatagggatgatttgaaatatataattgaattttttgagtttattgttattttatttgggttgatgtttagagtttttttagtattttattggtatttaaaaat

SEQ ID NO: 1539 - DNA, 120 bp, synthetic construct
  source 1..120: mol_type = other DNA
cactaatacaccaacttataaaaataacccaaaacatacaactaaactttttaaatctatatttatctcacctaaactaatattcaaaatctccttaacattttattaacatccaaaaac

SEQ ID NO: 1540 - DNA, 120 bp, synthetic construct
  source 1..120: mol_type = other DNA
tattaatatattggtttatagggatgatttgaaatatataattgaattttttgagtttatatttattttatttgggttgatgtttagagtttttttagtattttattggtatttaaaaat

SEQ ID NO: 1541 - DNA, 120 bp, synthetic construct
  source 1..120: mol_type = other DNA
cactaatacaccgacttataaaaataacccgaaacatacaactaaactttttaaatctatcgttatctcacctaaactaatattcaaaatctccttaacattttattaacatccaaaaac

SEQ ID NO: 1542 - DNA, 120 bp, synthetic construct
  source 1..120: mol_type = other DNA
tattaatatatcggtttatagggatgattcgaaatatataattgaattttttgagtttatcgttattttatttgggttgatgtttagagtttttttagtattttattggtatttaaaaat

SEQ ID NO: 1543 - DNA, 120 bp, synthetic construct
  source 1..120: mol_type = other DNA
cactaatacaccgacttataaaaataacccgaaacatacaactaaactttttaaatctatatttatctcacctaaactaatattcaaaatctccttaacattttattaacatccaaaaac

SEQ ID NO: 1544 - DNA, 120 bp, synthetic construct
  source 1..120: mol_type = other DNA
tattaatatatcggtttatagggatgattcgaaatatataattgaattttttgagtttatatttattttatttgggttgatgtttagagtttttttagtattttattggtatttaaaaat

SEQ ID NO: 1545 - DNA, 120 bp, synthetic construct
  source 1..120: mol_type = other DNA
ccttttctacaactccaaaataaattccttaaaattaactattacaattaatctaacaaatcaaaacttaactaaatacacatattaaacataacttttttaaccttaaaccaaaaaaaa

SEQ ID NO: 1546 - DNA, 120 bp, synthetic construct
  source 1..120: mol_type = other DNA
ttttttttatagttttagagtaagttttttgggattggttattataattaatttagtgaattggaatttagttagatatgtatgttggatataatttttttgattttgggttaaggaaag

SEQ ID NO: 1547 - DNA, 120 bp, synthetic construct
  source 1..120: mol_type = other DNA
ccttttctacaactccaaaataaattccttaaaattaactattacaattaatctaacaaaaaaaaacttaactaaatacacatattaaacataacttttttaaccttaaaccaaaaaaaa

SEQ ID NO: 1548 - DNA, 120 bp, synthetic construct
  source 1..120: mol_type = other DNA
ttttttttatagttttagagtaagttttttgggattggttattataattaatttagtgaagaggaatttagttagatatgtatgttggatataatttttttgattttgggttaaggaaag

SEQ ID NO: 1549 - DNA, 120 bp, synthetic construct
  source 1..120: mol_type = other DNA
ccttttctacaactccaaaataaattccttaaaattaactattacaattaatctaacgaatcgaaacttaactaaatacgcatattaaacataacttttttaaccttaaaccaaaaaaaa

SEQ ID NO: 1550 - DNA, 120 bp, synthetic construct
  source 1..120: mol_type = other DNA
ttttttttatagttttagagtaagttttttgggattggttattataattaatttagcgaatcggaatttagttagatacgtatgttggatataatttttttgattttgggttaaggaaag

SEQ ID NO: 1551 - DNA, 120 bp, synthetic construct
  source 1..120: mol_type = other DNA
ccttttctacaactccaaaataaattccttaaaattaactattacaattaatctaacgaaaaaaaacttaactaaatacgcatattaaacataacttttttaaccttaaaccaaaaaaaa

SEQ ID NO: 1552 - DNA, 120 bp, synthetic construct
  source 1..120: mol_type = other DNA
ttttttttatagttttagagtaagttttttgggattggttattataattaatttagcgaagaggaatttagttagatacgtatgttggatataatttttttgattttgggttaaggaaag

SEQ ID NO: 1553 - DNA, 120 bp, synthetic construct
  source 1..120: mol_type = other DNA
acacaattaaaactacaaaacaatcaaataactacatcacaacaatataacaatcacacactaacaatataaatctaaaaatataaataacctaaacaccccacttaaaaaacacaaaat

SEQ ID NO: 1554 - DNA, 120 bp, synthetic construct
  source 1..120: mol_type = other DNA
atataattgagattataaagtaattaggtgattgtattataatagtatgataattgtatattagtaatgtgaatttggaaatataagtggtttaaatattttatttaaaaggtatagaat

SEQ ID NO: 1555 - DNA, 120 bp, synthetic construct
  source 1..120: mol_type = other DNA
acacaattaaaactacaaaacaatcaaataactacatcacaacaatataacaatcacacaaaaacaatataaatctaaaaatataaataacctaaacaccccacttaaaaaacacaaaat

SEQ ID NO: 1556 - DNA, 120 bp, synthetic construct
  source 1..120: mol_type = other DNA
atataattgagattataaagtaattaggtgattgtattataatagtatgataattgtatagaagtaatgtgaatttggaaatataagtggtttaaatattttatttaaaaggtatagaat

SEQ ID NO: 1557 - DNA, 120 bp, synthetic construct
  source 1..120: mol_type = other DNA
acacaattaaaactacaaaacaatcaaataactacatcacaacaatataacaatcgcacactaacaatataaatctaaaaatataaataacctaaacaccccacttaaaaaacacaaaat

SEQ ID NO: 1558 - DNA, 120 bp, synthetic construct
  source 1..120: mol_type = other DNA
atataattgagattataaagtaattaggtgattgtattataatagtatgataatcgtatattagtaatgtgaatttggaaatataagtggtttaaatattttatttaaaaggtatagaat

SEQ ID NO: 1559 - DNA, 120 bp, synthetic construct
  source 1..120: mol_type = other DNA
acacaattaaaactacaaaacaatcaaataactacatcacaacaatataacaatcgcacaaaaacaatataaatctaaaaatataaataacctaaacaccccacttaaaaaacacaaaat

SEQ ID NO: 1560 - DNA, 120 bp, synthetic construct
  source 1..120: mol_type = other DNA
atataattgagattataaagtaattaggtgattgtattataatagtatgataatcgtatagaagtaatgtgaatttggaaatataagtggtttaaatattttatttaaaaggtatagaat

SEQ ID NO: 1561 - DNA, 120 bp, synthetic construct
  source 1..120: mol_type = other DNA
cccttcaaaacactaataccaaaaaaacccatacctaccaaactaatcctcataaacataaaactctaaacaaaaaattaacccaactttcacttaaccccccaaaaaacacttctaaaa

SEQ ID NO: 1562 - DNA, 120 bp, synthetic construct
  source 1..120: mol_type = other DNA
ttttttaggatgttggtgttagaagggtttgtgtttgttaggttggtttttgtggatatagggttttggatgaagggttggtttggtttttatttagttttttaggagatgtttttggga

SEQ ID NO: 1563 - DNA, 120 bp, synthetic construct
  source 1..120: mol_type = other DNA
cccttcaaaacactaataccaaaaaaacccatacctaccaaactaatcctcataaacatcaatctctaaacaaaaaattaacccaactttcacttaaccccccaaaaaacacttctaaaa

SEQ ID NO: 1564 - DNA, 120 bp, synthetic construct
  source 1..120: mol_type = other DNA
ttttttaggatgttggtgttagaagggtttgtgtttgttaggttggtttttgtggatattggtttttggatgaagggttggtttggtttttatttagttttttaggagatgtttttggga

SEQ ID NO: 1565 - DNA, 120 bp, synthetic construct
  source 1..120: mol_type = other DNA
cccttcaaaacgctaataccaaaaaaacccgtacctaccaaactaatcctcgtaaacataaaactctaaacgaaaaattaacccgactttcacttaaccccccaaaaaacgcttctaaaa

SEQ ID NO: 1566 - DNA, 120 bp, synthetic construct
  source 1..120: mol_type = other DNA
ttttttaggacgttggtgttagaagggttcgtgtttgttaggttggttttcgtggatatagggttttggacgaagggttggttcggtttttatttagttttttaggagacgtttttggga

SEQ ID NO: 1567 - DNA, 120 bp, synthetic construct
  source 1..120: mol_type = other DNA
cccttcaaaacgctaataccaaaaaaacccgtacctaccaaactaatcctcgtaaacatcgatctctaaacgaaaaattaacccgactttcacttaaccccccaaaaaacgcttctaaaa

SEQ ID NO: 1568 - DNA, 120 bp, synthetic construct
  source 1..120: mol_type = other DNA
ttttttaggacgttggtgttagaagggttcgtgtttgttaggttggttttcgtggatatcggtttttggacgaagggttggttcggtttttatttagttttttaggagacgtttttggga

SEQ ID NO: 1569 - DNA, 120 bp, synthetic construct
  source 1..120: mol_type = other DNA
acaaaacataacatcatccaacctctactttctccaactctccaataaacttaactccataacctaaattttcctcattccttacattaaaaatcatttcttcccaaaaaaatttaaata

SEQ ID NO: 1570 - DNA, 120 bp, synthetic construct
  source 1..120: mol_type = other DNA
gtaaggtatggtattatttagtttttattttttttagttttttagtgaatttaattttatgatttgggttttttttattttttatattagggattatttttttttaaaaaaatttagata

SEQ ID NO: 1571 - DNA, 120 bp, synthetic construct
  source 1..120: mol_type = other DNA
acaaaacataacatcatccaacctctactttctccaactctccaataaacttaactccaaaaactaaattttcctcattccttacattaaaaatcatttcttcccaaaaaaatttaaata

SEQ ID NO: 1572 - DNA, 120 bp, synthetic construct
  source 1..120: mol_type = other DNA
gtaaggtatggtattatttagtttttattttttttagttttttagtgaatttaattttaagagttgggttttttttattttttatattagggattatttttttttaaaaaaatttagata

SEQ ID NO: 1573 - DNA, 120 bp, synthetic construct; identical to SEQ ID NO: 1569
  source 1..120: mol_type = other DNA

SEQ ID NO: 1574 - DNA, 120 bp, synthetic construct; identical to SEQ ID NO: 1570
  source 1..120: mol_type = other DNA

SEQ ID NO: 1575 - DNA, 120 bp, synthetic construct; identical to SEQ ID NO: 1571
  source 1..120: mol_type = other DNA

SEQ ID NO: 1576 - DNA, 120 bp, synthetic construct; identical to SEQ ID NO: 1572
  source 1..120: mol_type = other DNA

SEQ ID NO: 1577 - DNA, 120 bp, synthetic construct
  source 1..120: mol_type = other DNA
acaccttataacaattcttaaaaaaaaaaaaacatcaaaaaattaaaaataaaatacaattacctcactcctacctccattctattatatataatacaaaatattaaaatcatataacac

SEQ ID NO: 1578 - DNA, 120 bp, synthetic construct
  source 1..120: mol_type = other DNA
gtattttatggtaatttttgagagagggagagtgttagggaattgagaatggggtgtagttgttttatttttgtttttattttgttgtgtataatatggaatgttagggttatgtgatat

SEQ ID NO: 1579 - DNA, 120 bp, synthetic construct
  source 1..120: mol_type = other DNA
acaccttataacaattcttaaaaaaaaaaaaacatcaaaaaattaaaaataaaatactattaccacactcctacctccattctattatatataatacaaaatattaaaatcatataacac

SEQ ID NO: 1580 - DNA, 120 bp, synthetic construct
  source 1..120: mol_type = other DNA
gtattttatggtaatttttgagagagggagagtgttagggaattgagaatggggtgttgttgttatatttttgtttttattttgttgtgtataatatggaatgttagggttatgtgatat

SEQ ID NO: 1581 - DNA, 120 bp, synthetic construct
  source 1..120: mol_type = other DNA
acaccttataacaattcttaaaaaaaaaaaaacgtcaaaaaattaaaaataaaatacaattacctcactcctacctccattctattatatataatacgaaatattaaaatcatataacac

SEQ ID NO: 1582 - DNA, 120 bp, synthetic construct
  source 1..120: mol_type = other DNA
gtattttatggtaatttttgagagagggagagcgttagggaattgagaatggggtgtagttgttttatttttgtttttattttgttgtgtataatacggaatgttagggttatgtgatat

SEQ ID NO: 1583 - DNA, 120 bp, synthetic construct
  source 1..120: mol_type = other DNA
acaccttataacaattcttaaaaaaaaaaaaacgtcaaaaaattaaaaataaaatactattaccacactcctacctccattctattatatataatacgaaatattaaaatcatataacac

SEQ ID NO: 1584 - DNA, 120 bp, synthetic construct
  source 1..120: mol_type = other DNA
gtattttatggtaatttttgagagagggagagcgttagggaattgagaatggggtgttgttgttatatttttgtttttattttgttgtgtataatacggaatgttagggttatgtgatat

SEQ ID NO: 1585 - DNA, 120 bp, synthetic construct
  source 1..120: mol_type = other DNA
atcttcataaaaaatcatatatacataaacttttaaaattaaatacaaacatactaccaaactattcaccaaatatataaatcctctccaaaaatttccattaattcatataattactca

SEQ ID NO: 1586 - DNA, 120 bp, synthetic construct
  source 1..120: mol_type = other DNA
atttttataggaaattatatatgtataaatttttagagttggatgtagatatgttattaagttatttattaaatatgtaagttttttttaaaagtttttattaatttatatggttgttta

SEQ ID NO: 1587 - DNA, 120 bp, synthetic construct
  source 1..120: mol_type = other DNA
atcttcataaaaaatcatatatacataaacttttaaaattaaatacaaacatactacaaaactaatcaccaaatatataaatcctctccaaaaatttccattaattcatataattactca

SEQ ID NO: 1588 - DNA, 120 bp, synthetic construct
  source 1..120: mol_type = other DNA
atttttataggaaattatatatgtataaatttttagagttggatgtagatatgttataaagttagttattaaatatgtaagttttttttaaaagtttttattaatttatatggttgttta

SEQ ID NO: 1589 - DNA, 120 bp, synthetic construct; identical to SEQ ID NO: 1585
  source 1..120: mol_type = other DNA

SEQ ID NO: 1590 - DNA, 120 bp, synthetic construct; identical to SEQ ID NO: 1586
  source 1..120: mol_type = other DNA

SEQ ID NO: 1591 - DNA, 120 bp, synthetic construct; identical to SEQ ID NO: 1587
  source 1..120: mol_type = other DNA

SEQ ID NO: 1592 - DNA, 120 bp, synthetic construct; identical to SEQ ID NO: 1588
  source 1..120: mol_type = other DNA

SEQ ID NO: 1593 - DNA, 120 bp, synthetic construct
  source 1..120: mol_type = other DNA
ccattattctactttccccaaaataacaaaactccctcactatccttaatcctaaaaaataaaaatacctactaacacttcctcctcttatcaaaaaaaaaccaaaaaaaaaacaccaat

SEQ ID NO: 1594 - DNA, 120 bp, synthetic construct
  source 1..120: mol_type = other DNA
ttattgttttattttttttagaatgatagagtttttttgttgtttttggttttgaaagatgggaatatttgttaatattttttttttttgttagaagaggattaaagaggaagtgttggt

SEQ ID NO: 1595 - DNA, 120 bp, synthetic construct
  source 1..120: mol_type = other DNA
ccattattctactttccccaaaataacaaaactccctcactatccttaatcctaaaacataaaactacctactaacacttcctcctcttatcaaaaaaaaaccaaaaaaaaaacaccaat

SEQ ID NO: 1596 - DNA, 120 bp, synthetic construct
  source 1..120: mol_type = other DNA
ttattgttttattttttttagaatgatagagtttttttgttgtttttggttttgaaatatgggattatttgttaatattttttttttttgttagaagaggattaaagaggaagtgttggt

SEQ ID NO: 1597 - DNA, 120 bp, synthetic construct
  source 1..120: mol_type = other DNA
ccattattctactttccccaaaataacaaaactccctcgctatccttaatcctaaaaaataaaaatacctactaacacttcctcctcttatcaaaaaaaaaccaaaaaaaaaacgccgat

SEQ ID NO: 1598 - DNA, 120 bp, synthetic construct
  source 1..120: mol_type = other DNA
ttattgttttattttttttagaatgatagagttttttcgttgtttttggttttgaaagatgggaatatttgttaatattttttttttttgttagaagaggattaaagaggaagcgtcggt

SEQ ID NO: 1599 - DNA, 120 bp, synthetic construct
  source 1..120: mol_type = other DNA
ccattattctactttccccaaaataacaaaactccctcgctatccttaatcctaaaacataaaactacctactaacacttcctcctcttatcaaaaaaaaaccaaaaaaaaaacgccgat

SEQ ID NO: 1600 - DNA, 120 bp, synthetic construct
  source 1..120: mol_type = other DNA
ttattgttttattttttttagaatgatagagttttttcgttgtttttggttttgaaatatgggattatttgttaatattttttttttttgttagaagaggattaaagaggaagcgtcggt

SEQ ID NO: 1601 - DNA, 120 bp, synthetic construct
  source 1..120: mol_type = other DNA
tatttataacttccatatattattattacctactaaacataaaaaaaaatcaaaaacaattatcatcccaaaaaataatactatatactaaaacaataactctaaaacttttttttaatc

SEQ ID NO: 1602 - DNA, 120 bp, synthetic construct
  source 1..120: mol_type = other DNA
tatttataatttttatgtattattgttgtttgttggatataaaaaaaaattaagaatgattattgttttaggagatagtgttatatattaaggtagtggttttgaaatttttttttggtt

SEQ ID NO: 1603 - DNA, 120 bp, synthetic construct
  source 1..120: mol_type = other DNA
tatttataacttccatatattattattacctactaaacataaaaaaaaatcaaaaactattatcttcccaaaaaataatactatatactaaaacaataactctaaaacttttttttaatc

SEQ ID NO: 1604 - DNA, 120 bp, synthetic construct
  source 1..120: mol_type = other DNA
tatttataatttttatgtattattgttgtttgttggatataaaaaaaaattaagaattattatttttttaggagatagtgttatatattaaggtagtggttttgaaatttttttttggtt

SEQ ID NO: 1605 - DNA, 120 bp, synthetic construct
  source 1..120: mol_type = other DNA
tatttataacttccatatattattattacctactaaacataaaaaaaaatcaaaaacgattatcgtcccaaaaaataatactatatactaaaacaataactctaaaacttttttttaatc

SEQ ID NO: 1606 - DNA, 120 bp, synthetic construct
  source 1..120: mol_type = other DNA
tatttataatttttatgtattattgttgtttgttggatataaaaaaaaattaagaacgattatcgttttaggagatagtgttatatattaaggtagtggttttgaaatttttttttggtt

SEQ ID NO: 1607 - DNA, 120 bp, synthetic construct; identical to SEQ ID NO: 1603
  source 1..120: mol_type = other DNA

SEQ ID NO: 1608 - DNA, 120 bp, synthetic construct; identical to SEQ ID NO: 1604
  source 1..120: mol_type = other DNA

SEQ ID NO: 1609 - DNA, 120 bp, synthetic construct
  source 1..120: mol_type = other DNA
tctcctaaataatttttttaaaaaatcaaattccataaaaacatactaacaactcaacctaaaaaaaaacctaaactttttttctacatttatataactaatatctaaaaaacatcaaaa

SEQ ID NO: 1610 - DNA, 120 bp, synthetic construct
  source 1..120: mol_type = other DNA
ttttttaagtagtttttttgggggattaaattttatagaagtatattggtaatttgatttagaggaaagtttgggttttttttttatatttgtgtaattgatgtttgaagaatgttagaa

SEQ ID NO: 1611 - DNA, 120 bp, synthetic construct
  source 1..120: mol_type = other DNA
tctcctaaataatttttttaaaaaatcaaattccataaaaacatactaacaactcaaactaaaataaaacctaaactttttttctacatttatataactaatatctaaaaaacatcaaaa

SEQ ID NO: 1612 - DNA, 120 bp, synthetic construct
  source 1..120: mol_type = other DNA
ttttttaagtagtttttttgggggattaaattttatagaagtatattggtaatttgagttagagtaaagtttgggttttttttttatatttgtgtaattgatgtttgaagaatgttagaa

SEQ ID NO: 1613 - DNA, 120 bp, synthetic construct
  source 1..120: mol_type = other DNA
tctcctaaataatttttttaaaaaatcaaattccataaaaacatactaacaactcgacctaaaaaaaaacctaaactttttttctacatttatataactaatatctaaaaaacgtcaaaa

SEQ ID NO: 1614 - DNA, 120 bp, synthetic construct
  source 1..120: mol_type = other DNA
ttttttaagtagtttttttgggggattaaattttatagaagtatattggtaattcgatttagaggaaagtttgggttttttttttatatttgtgtaattgatgtttgaagaacgttagaa

SEQ ID NO: 1615 - DNA, 120 bp, synthetic construct
  source 1..120: mol_type = other DNA
tctcctaaataatttttttaaaaaatcaaattccataaaaacatactaacaactcgaactaaaataaaacctaaactttttttctacatttatataactaatatctaaaaaacgtcaaaa

SEQ ID NO: 1616 - DNA, 120 bp, synthetic construct
  source 1..120: mol_type = other DNA
ttttttaagtagtttttttgggggattaaattttatagaagtatattggtaattcgagttagagtaaagtttgggttttttttttatatttgtgtaattgatgtttgaagaacgttagaa

SEQ ID NO: 1617 - DNA, 120 bp, synthetic construct
  source 1..120: mol_type = other DNA
tctatatttcctatataaaaaccaatcacaattcactttaccatattaactcaaaacaacatattaaactcttaaaaaatccctctaaaactcctctatcttaacttaaaaaacaaacac

SEQ ID NO: 1618 - DNA, 120 bp, synthetic construct
  source 1..120: mol_type = other DNA
tttatgttttttgtatagggattaattatagtttattttgttgtattaatttagagtaatatattaagtttttgaggggtttttttgaagtttttttgttttaatttgagaagtaagtat

SEQ ID NO: 1619 - DNA, 120 bp, synthetic construct
  source 1..120: mol_type = other DNA
tctatatttcctatataaaaaccaatcacaattcactttaccatattaactcaaaaaaacatataaaactcttaaaaaatccctctaaaactcctctatcttaacttaaaaaacaaacac

SEQ ID NO: 1620 - DNA, 120 bp, synthetic construct
  source 1..120: mol_type = other DNA
tttatgttttttgtatagggattaattatagtttattttgttgtattaatttagaggaatatatgaagtttttgaggggtttttttgaagtttttttgttttaatttgagaagtaagtat

SEQ ID NO: 1621 - DNA, 120 bp, synthetic construct
  source 1..120: mol_type = other DNA
tctatatttcctatataaaaaccaatcacaattcactttaccgtattaactcaaaacaacatattaaactcttaaaaaatccctctaaaactcctctatcttaacttaaaaaacaaacac

SEQ ID NO: 1622 - DNA, 120 bp, synthetic construct
  source 1..120: mol_type = other DNA
tttatgttttttgtatagggattaattatagtttattttgtcgtattaatttagagtaatatattaagtttttgaggggtttttttgaagtttttttgttttaatttgagaagtaagtat

SEQ ID NO: 1623 - DNA, 120 bp, synthetic construct
  source 1..120: mol_type = other DNA
tctatatttcctatataaaaaccaatcacaattcactttaccgtattaactcaaaaaaacatataaaactcttaaaaaatccctctaaaactcctctatcttaacttaaaaaacaaacac

SEQ ID NO: 1624 - DNA, 120 bp, synthetic construct
  source 1..120: mol_type = other DNA
tttatgttttttgtatagggattaattatagtttattttgtcgtattaatttagaggaatatatgaagtttttgaggggtttttttgaagtttttttgttttaatttgagaagtaagtat

SEQ ID NO: 1625 - DNA, 120 bp, synthetic construct
  source 1..120: mol_type = other DNA
aaaaataactaaaaacaaaaaaaacaatcctaaaattataaataccaaaaaaccccaaaaaaacaatactaaatactacaacctcaaaaaacaacaactaaacttaaaaaaaaaaaaaac

SEQ ID NO: 1626 - DNA, 120 bp, synthetic construct
  source 1..120: mol_type = other DNA
ggggatgattgggggtagaggggatagttttggaattgtgaatgttaagaagttttggaaaggtagtattgggtgttgtggttttaggaaatggtagttggatttggaagggggaggagt

SEQ ID NO: 1627 - DNA, 120 bp, synthetic construct
  source 1..120: mol_type = other DNA
aaaaataactaaaaacaaaaaaaacaatcctaaaattataaataccaaaaaacccaaaaaaaacactactaaatactacaacctcaaaaaacaacaactaaacttaaaaaaaaaaaaaac

SEQ ID NO: 1628 - DNA, 120 bp, synthetic construct
  source 1..120: mol_type = other DNA
ggggatgattgggggtagaggggatagttttggaattgtgaatgttaagaagtttgggaaaggtattattgggtgttgtggttttaggaaatggtagttggatttggaagggggaggagt

SEQ ID NO: 1629 - DNA, 120 bp, synthetic construct
  source 1..120: mol_type = other DNA
aaaaataactaaaaacaaaaaaaacaatcctaaaattataaataccaaaaaaccccgaaaaaacaatactaaatactacgacctcaaaaaacgacaactaaacttaaaaaaaaaaaaaac

SEQ ID NO: 1630 - DNA, 120 bp, synthetic construct
  source 1..120: mol_type = other DNA
ggggatgattgggggtagaggggatagttttggaattgtgaatgttaagaagtttcggaaaggtagtattgggtgttgcggttttaggaaacggtagttggatttggaagggggaggagt

SEQ ID NO: 1631 - DNA, 120 bp, synthetic construct
  source 1..120: mol_type = other DNA
aaaaataactaaaaacaaaaaaaacaatcctaaaattataaataccaaaaaacccgaaaaaaacactactaaatactacgacctcaaaaaacgacaactaaacttaaaaaaaaaaaaaac

SEQ ID NO: 1632 - DNA, 120 bp, synthetic construct
  source 1..120: mol_type = other DNA
ggggatgattgggggtagaggggatagttttggaattgtgaatgttaagaagttcgggaaaggtattattgggtgttgcggttttaggaaacggtagttggatttggaagggggaggagt

SEQ ID NO: 1633 - DNA, 120 bp, synthetic construct
  source 1..120: mol_type = other DNA
ttcaaaataataccaaaaacttacttaacttttaatctataccaaacattattctaaacaaaatacatacaatactatcttataaaccctaaatttaaaaaacccccaatccctttataa

SEQ ID NO: 1634 - DNA, 120 bp, synthetic construct
  source 1..120: mol_type = other DNA
tttaggataatgttaaaaatttatttagtttttagtttgtgttaggtattgttttgaataaggtatatataatgttgttttgtagattttggatttggaaagtttttaatttttttataa

SEQ ID NO: 1635 - DNA, 120 bp, synthetic construct
  source 1..120: mol_type = other DNA
ttcaaaataataccaaaaacttacttaacttttaatctataccaaacattattctaaacactatacatacaatactatcttataaaccctaaatttaaaaaacccccaatccctttataa

SEQ ID NO: 1636 - DNA, 120 bp, synthetic construct
  source 1..120: mol_type = other DNA
tttaggataatgttaaaaatttatttagtttttagtttgtgttaggtattgttttgaatattgtatatataatgttgttttgtagattttggatttggaaagtttttaatttttttataa

SEQ ID NO: 1637 - DNA, 120 bp, synthetic construct; identical to SEQ ID NO: 1633
  source 1..120: mol_type = other DNA

SEQ ID NO: 1638 - DNA, 120 bp, synthetic construct; identical to SEQ ID NO: 1634
  source 1..120: mol_type = other DNA

SEQ ID NO: 1639 - DNA, 120 bp, synthetic construct; identical to SEQ ID NO: 1635
  source 1..120: mol_type = other DNA

SEQ ID NO: 1640 - DNA, 120 bp, synthetic construct; identical to SEQ ID NO: 1636
  source 1..120: mol_type = other DNA

SEQ ID NO: 1641 - DNA, 120 bp, synthetic construct
  source 1..120: mol_type = other DNA
aaaaaaaaaaaaaaaatccaatacaatatccttattttctcattcccaaccaaaattaaacctcaaataaaaaaatataattaaattacccaaacaaaattaacaaaaaccaaaaattaa

SEQ ID NO: 1642 - DNA, 120 bp, synthetic construct
  source 1..120: mol_type = other DNA
agaaaagaaaagaaagtttaatgtagtgtttttgtttttttatttttagttagggttgaattttagatggagaagtgtggttgagttgtttaaatagaattggtgaaagttagaggttag

SEQ ID NO: 1643 - DNA, 120 bp, synthetic construct
  source 1..120: mol_type = other DNA
aaaaaaaaaaaaaaaatccaatacaatatccttattttctcattcccaaccaaaattaaaaatcaaataaaaaaatataattaaattacccaaacaaaattaacaaaaaccaaaaattaa

SEQ ID NO: 1644 - DNA, 120 bp, synthetic construct
  source 1..120: mol_type = other DNA
agaaaagaaaagaaagtttaatgtagtgtttttgtttttttatttttagttagggttgaaagttagatggagaagtgtggttgagttgtttaaatagaattggtgaaagttagaggttag

SEQ ID NO: 1645 - DNA, 120 bp, synthetic construct
  source 1..120: mol_type = other DNA
aaaaaaaaaaaaaaaatccaatacaatatccttattttctcattcccaaccaaaattaaacctcaaataaaaaaatataattaaattacccaaacaaaattaacgaaaaccaaaaattaa

SEQ ID NO: 1646 - DNA, 120 bp, synthetic construct
  source 1..120: mol_type = other DNA
agaaaagaaaagaaagtttaatgtagtgtttttgtttttttatttttagttagggttgaattttagatggagaagtgtggttgagttgtttaaatagaattggcgaaagttagaggttag

SEQ ID NO: 1647 - DNA, 120 bp, synthetic construct
  source 1..120: mol_type = other DNA
aaaaaaaaaaaaaaaatccaatacaatatccttattttctcattcccaaccaaaattaaaaatcaaataaaaaaatataattaaattacccaaacaaaattaacgaaaaccaaaaattaa

SEQ ID NO: 1648 - DNA, 120 bp, synthetic construct
  source 1..120: mol_type = other DNA
agaaaagaaaagaaagtttaatgtagtgtttttgtttttttatttttagttagggttgaaagttagatggagaagtgtggttgagttgtttaaatagaattggcgaaagttagaggttag

SEQ ID NO: 1649 - DNA, 120 bp, synthetic construct
  source 1..120: mol_type = other DNA
ccataaaataaaacacattaaaccacctaaaaaattaaataaaaccttcaaaaccctaaaaaacattccaacctcctcctaccatccctacttcctacccaccacaccaaactccctaca

SEQ ID NO: 1650 - DNA, 120 bp, synthetic construct
  source 1..120: mol_type = other DNA
ttatgaaataaagtatattggattatttggaaaattgggtggggtttttaaggttttgaggagtattttgatttttttttgttatttttgttttttgtttattatgttagattttttgta

SEQ ID NO: 1651 - DNA, 120 bp, synthetic construct
  source 1..120: mol_type = other DNA
ccataaaataaaacacattaaaccacctaaaaaattaaataaaaccttcaaaaccctaaattacattccaacctcctcctaccatccctacttcctacccaccacaccaaactccctaca

SEQ ID NO: 1652 - DNA, 120 bp, synthetic construct
  source 1..120: mol_type = other DNA
ttatgaaataaagtatattggattatttggaaaattgggtggggtttttaaggttttgagttgtattttgatttttttttgttatttttgttttttgtttattatgttagattttttgta

SEQ ID NO: 1653 - DNA, 120 bp, synthetic construct
  source 1..120: mol_type = other DNA
ccataaaataaaacacattaaaccacctaaaaaattaaataaaaccttcaaaaccctaaaaaacattccgacctcctcctaccatccctacttcctacccaccacgccaaactccctaca

SEQ ID NO: 1654 - DNA, 120 bp, synthetic construct
  source 1..120: mol_type = other DNA
ttatgaaataaagtatattggattatttggaaaattgggtggggtttttaaggttttgaggagtatttcgatttttttttgttatttttgttttttgtttattacgttagattttttgta

SEQ ID NO: 1655 - DNA, 120 bp, synthetic construct
  source 1..120: mol_type = other DNA
ccataaaataaaacacattaaaccacctaaaaaattaaataaaaccttcaaaaccctaaattacattccgacctcctcctaccatccctacttcctacccaccacgccaaactccctaca

SEQ ID NO: 1656 - DNA, 120 bp, synthetic construct
  source 1..120: mol_type = other DNA
ttatgaaataaagtatattggattatttggaaaattgggtggggtttttaaggttttgagttgtatttcgatttttttttgttatttttgttttttgtttattacgttagattttttgta

SEQ ID NO: 1657 - DNA, 120 bp, synthetic construct
  source 1..120: mol_type = other DNA
aaaaataaaaaaaaaaaaaaaaaataaccaaatatcctaataaaaacaaaataactcaaaaaactaataaaatatctaaattaaatattaaaaaacatacaaaaccccacaaacaaccaa

SEQ ID NO: 1658 - DNA, 120 bp, synthetic construct
  source 1..120: mol_type = other DNA
aagagtgaagggaaaaggagaggataattagatattttagtgaggataagataatttagagagttggtgggatgtttgggttgaatattgagaagtatgtagagttttgtaggtagttaa

SEQ ID NO: 1659 - DNA, 120 bp, synthetic construct
  source 1..120: mol_type = other DNA
aaaaataaaaaaaaaaaaaaaaaataaccaaatatcctaataaaaacaaaataactcaaattactaataaaatatctaaattaaatattaaaaaacatacaaaaccccacaaacaaccaa

SEQ ID NO: 1660 - DNA, 120 bp, synthetic construct
  source 1..120: mol_type = other DNA
aagagtgaagggaaaaggagaggataattagatattttagtgaggataagataatttagattgttggtgggatgtttgggttgaatattgagaagtatgtagagttttgtaggtagttaa

SEQ ID NO: 1661 - DNA, 120 bp, synthetic construct
  source 1..120: mol_type = other DNA
aaaaataaaaaaaaaaaaaaaaaataaccaaatatcctaataaaaacaaaataactcaaaaaactaataaaatatctaaattaaatattaaaaaacatacaaaaccccgcaaacaaccaa

SEQ ID NO: 1662 - DNA, 120 bp, synthetic construct
  source 1..120: mol_type = other DNA
aagagtgaagggaaaaggagaggataattagatattttagtgaggataagataatttagagagttggtgggatgtttgggttgaatattgagaagtatgtagagtttcgtaggtagttaa

SEQ ID NO: 1663 - DNA, 120 bp, synthetic construct
  source 1..120: mol_type = other DNA
aaaaataaaaaaaaaaaaaaaaaataaccaaatatcctaataaaaacaaaataactcaaattactaataaaatatctaaattaaatattaaaaaacatacaaaaccccgcaaacaaccaa

SEQ ID NO: 1664 - DNA, 120 bp, synthetic construct
  source 1..120: mol_type = other DNA
aagagtgaagggaaaaggagaggataattagatattttagtgaggataagataatttagattgttggtgggatgtttgggttgaatattgagaagtatgtagagtttcgtaggtagttaa

SEQ ID NO: 1665 - DNA, 120 bp, synthetic construct
  source 1..120: mol_type = other DNA
tacaataacaataaaaacaattttccatcaacataaacaaattttaataatctaacaattacaatataattatatatacaataacataataaatatatttatattttatacattataaaa

SEQ ID NO: 1666 - DNA, 120 bp, synthetic construct
  source 1..120: mol_type = other DNA
tgtaataataataaggataattttttattagtgtaaataaattttaatggtttagtagttataatgtaattatatgtgtaatgatatgatgaatgtgtttatattttatatattataaaa

SEQ ID NO: 1667 - DNA, 120 bp, synthetic construct
  source 1..120: mol_type = other DNA
tacaataacaataaaaacaattttccatcaacataaacaaattttaataatctaacaaatactatataattatatatacaataacataataaatatatttatattttatacattataaaa

SEQ ID NO: 1668 - DNA, 120 bp, synthetic construct
  source 1..120: mol_type = other DNA
tgtaataataataaggataattttttattagtgtaaataaattttaatggtttagtaggtattatgtaattatatgtgtaatgatatgatgaatgtgtttatattttatatattataaaa

SEQ ID NO: 1669 - DNA, 120 bp, synthetic construct
  source 1..120: mol_type = other DNA
tacaataacaataaaaacaattttccatcaacgtaaacaaattttaataatctaacaattacaatataattatatatacaataacataataaatatatttatattttatacattataaaa

SEQ ID NO: 1670 - DNA, 120 bp, synthetic construct
  source 1..120: mol_type = other DNA
tgtaataataataaggataattttttattagcgtaaataaattttaatggtttagtagttataatgtaattatatgtgtaatgatatgatgaatgtgtttatattttatatattataaaa

SEQ ID NO: 1671 - DNA, 120 bp, synthetic construct
  source 1..120: mol_type = other DNA
tacaataacaataaaaacaattttccatcaacgtaaacaaattttaataatctaacaaatactatataattatatatacaataacataataaatatatttatattttatacattataaaa

SEQ ID NO: 1672 - DNA, 120 bp, synthetic construct
  source 1..120: mol_type = other DNA
tgtaataataataaggataattttttattagcgtaaataaattttaatggtttagtaggtattatgtaattatatgtgtaatgatatgatgaatgtgtttatattttatatattataaaa

SEQ ID NO: 1673 - DNA, 120 bp, synthetic construct
  source 1..120: mol_type = other DNA
taaaccactataccaaactcaaatacctatttctaaaacttcctcttactatcaaacacaaaaaataaaacttactataaaataacaaataacataacacataacctctaccaaacttac

SEQ ID NO: 1674 - DNA, 120 bp, synthetic construct
  source 1..120: mol_type = other DNA
tgagttattgtgttaggtttaggtatttatttttagagtttttttttattgttaggtatagaagatggggtttgttgtgagatggtagatagtatgatatgtaatttttgttaagtttgt

SEQ ID NO: 1675 - DNA, 120 bp, synthetic construct
  source 1..120: mol_type = other DNA
taaaccactataccaaactcaaatacctatttctaaaacttcctcttactatcaaacaaaaataataaaacttactataaaataacaaataacataacacataacctctaccaaacttac

SEQ ID NO: 1676 - DNA, 120 bp, synthetic construct
  source 1..120: mol_type = other DNA
tgagttattgtgttaggtttaggtatttatttttagagtttttttttattgttaggtagagatgatggggtttgttgtgagatggtagatagtatgatatgtaatttttgttaagtttgt

SEQ ID NO: 1677 - DNA, 120 bp, synthetic construct
  source 1..120: mol_type = other DNA
taaaccactataccaaactcaaatacctatttctaaaacttcctcttactatcaaacacaaaaaataaaacttactataaaataacaaataacataacacgtaacctctaccaaacttac

SEQ ID NO: 1678 - DNA, 120 bp, synthetic construct
  source 1..120: mol_type = other DNA
tgagttattgtgttaggtttaggtatttatttttagagtttttttttattgttaggtatagaagatggggtttgttgtgagatggtagatagtatgatacgtaatttttgttaagtttgt

SEQ ID NO: 1679 - DNA, 120 bp, synthetic construct
  source 1..120: mol_type = other DNA
taaaccactataccaaactcaaatacctatttctaaaacttcctcttactatcaaacaaaaataataaaacttactataaaataacaaataacataacacgtaacctctaccaaacttac

SEQ ID NO: 1680 - DNA, 120 bp, synthetic construct
  source 1..120: mol_type = other DNA
tgagttattgtgttaggtttaggtatttatttttagagtttttttttattgttaggtagagatgatggggtttgttgtgagatggtagatagtatgatacgtaatttttgttaagtttgt

SEQ ID NO: 1681 - DNA, 120 bp, synthetic construct
  source 1..120: mol_type = other DNA
tcacacataaatttaatcattatcaataacaaattatttataaataacttcataactattataaatcacaaatcctcaaacacaaataaataccatacttttctccaaactacataaaat

SEQ ID NO: 1682 - DNA, 120 bp, synthetic construct
  source 1..120: mol_type = other DNA
ttatatatagatttaattattattagtaataaattatttgtgaatgattttataattgttgtagattataagtttttaaatgtaaatgggtgttatatttttttttaggttgtgtgaaat

SEQ ID NO: 1683 - DNA, 120 bp, synthetic construct
  source 1..120: mol_type = other DNA
tcacacataaatttaatcattatcaataacaaattatttataaataacttcataactaatattaatcacaaatcctcaaacacaaataaataccatacttttctccaaactacataaaat

SEQ ID NO: 1684 - DNA, 120 bp, synthetic construct
  source 1..120: mol_type = other DNA
ttatatatagatttaattattattagtaataaattatttgtgaatgattttataattgatgttgattataagtttttaaatgtaaatgggtgttatatttttttttaggttgtgtgaaat

SEQ ID NO: 1685 - DNA, 120 bp, synthetic construct
  source 1..120: mol_type = other DNA
tcacacataaatttaatcattatcaataacaaattatttataaataacttcataactattataaatcacaaatcctcaaacgcaaataaataccatacttttctccaaactacgtaaaat

SEQ ID NO: 1686 - DNA, 120 bp, synthetic construct
  source 1..120: mol_type = other DNA
ttatatatagatttaattattattagtaataaattatttgtgaatgattttataattgttgtagattataagtttttaaacgtaaatgggtgttatatttttttttaggttgcgtgaaat

SEQ ID NO: 1687 - DNA, 120 bp, synthetic construct
  source 1..120: mol_type = other DNA
tcacacataaatttaatcattatcaataacaaattatttataaataacttcataactaatattaatcacaaatcctcaaacgcaaataaataccatacttttctccaaactacgtaaaat

SEQ ID NO: 1688 - DNA, 120 bp, synthetic construct
  source 1..120: mol_type = other DNA
ttatatatagatttaattattattagtaataaattatttgtgaatgattttataattgatgttgattataagtttttaaacgtaaatgggtgttatatttttttttaggttgcgtgaaat

SEQ ID NO: 1689 - DNA, 120 bp, synthetic construct
  source 1..120: mol_type = other DNA
ccctataatcataatccataaatataaaaataacttccaaattcccaaaaaccccaatttacaaatcatttccaaaaatcataacaaacaaactcaacaaacttacttacccaaaaaaca

SEQ ID NO: 1690 - DNA, 120 bp, synthetic construct
  source 1..120: mol_type = other DNA
ttttatgattataatttgtaaatataagaatagtttttaagtttttagaaattttgatttgtaaattgtttttagaaattatggtagataaatttggtaagtttatttatttagaaagta

SEQ ID NO: 1691 - DNA, 120 bp, synthetic construct
  source 1..120: mol_type = other DNA
ccctataatcataatccataaatataaaaataacttccaaattcccaaaaaccccactttacaattcatttccaaaaatcataacaaacaaactcaacaaacttacttacccaaaaaaca

SEQ ID NO: 1692 - DNA, 120 bp, synthetic construct
  source 1..120: mol_type = other DNA
ttttatgattataatttgtaaatataagaatagtttttaagtttttagaaattttgttttgtaatttgtttttagaaattatggtagataaatttggtaagtttatttatttagaaagta

SEQ ID NO: 1693 - DNA, 120 bp, synthetic construct
  source 1..120: mol_type = other DNA
ccctataatcataatccgtaaatataaaaataacttccaaattcccaaaaaccccgatttacaaatcgtttccaaaaatcataacaaacaaactcgacaaacttacttacccaaaaaaca

SEQ ID NO: 1694 - DNA, 120 bp, synthetic construct
  source 1..120: mol_type = other DNA
ttttatgattataattcgtaaatataagaatagtttttaagtttttagaaatttcgatttgtaaatcgtttttagaaattatggtagataaattcggtaagtttatttatttagaaagta

SEQ ID NO: 1695 - DNA, 120 bp, synthetic construct
  source 1..120: mol_type = other DNA
ccctataatcataatccgtaaatataaaaataacttccaaattcccaaaaaccccgctttacaattcgtttccaaaaatcataacaaacaaactcgacaaacttacttacccaaaaaaca

SEQ ID NO: 1696 - DNA, 120 bp, synthetic construct
  source 1..120: mol_type = other DNA
ttttatgattataattcgtaaatataagaatagtttttaagtttttagaaatttcgttttgtaattcgtttttagaaattatggtagataaattcggtaagtttatttatttagaaagta

SEQ ID NO: 1697 - DNA, 120 bp, synthetic construct
  source 1..120: mol_type = other DNA
taatttatttttattcattatttatttatttacttacttattccaaaatacaaaatacctaaatctaatttaaaaactaacaaaactaatctaaaaaaaaaaaattaaaaatataaaaaa

SEQ ID NO: 1698 - DNA, 120 bp, synthetic construct
  source 1..120: mol_type = other DNA
tagtttgtttttgtttattgtttgtttgtttgtttgtttgttttaagatgtaagatatttgaatttgatttagaagttgatagaattgatttagaagagaagagttgaaggtatggaagg

SEQ ID NO: 1699 - DNA, 120 bp, synthetic construct
  source 1..120: mol_type = other DNA
taatttatttttattcattatttatttatttacttacttattccaaaatacaaaataactaaaactaatttaaaaactaacaaaactaatctaaaaaaaaaaaattaaaaatataaaaaa

SEQ ID NO: 1700 - DNA, 120 bp, synthetic construct
  source 1..120: mol_type = other DNA
tagtttgtttttgtttattgtttgtttgtttgtttgtttgttttaagatgtaagatagttgaaattgatttagaagttgatagaattgatttagaagagaagagttgaaggtatggaagg

SEQ ID NO: 1701 - DNA, 120 bp, synthetic construct; identical to SEQ ID NO: 1697
  source 1..120: mol_type = other DNA

SEQ ID NO: 1702 - DNA, 120 bp, synthetic construct; identical to SEQ ID NO: 1698
  source 1..120: mol_type = other DNA

SEQ ID NO: 1703 - DNA, 120 bp, synthetic construct; identical to SEQ ID NO: 1699
  source 1..120: mol_type = other DNA

SEQ ID NO: 1704 - DNA, 120 bp, synthetic construct; identical to SEQ ID NO: 1700
  source 1..120: mol_type = other DNA

SEQ ID NO: 1705 - DNA, 120 bp, synthetic construct
  source 1..120: mol_type = other DNA
aatcaaaaactttcattatataataaccataaaaaaacatccaacacctttacaaaattaaaaaacacaaacttcaaaaccaactatcacccttaaaactaaattcatccccaactctcc

SEQ ID NO: 1706 - DNA, 120 bp, synthetic construct
  source 1..120: mol_type = other DNA
ggttagggatttttattatataatgattatgaaaggatatttggtatttttatgaagttgaagagtataggttttagagttagttgttatttttgaggttgggtttatttttgatttttt

SEQ ID NO: 1707 - DNA, 120 bp, synthetic construct
  source 1..120: mol_type = other DNA
aatcaaaaactttcattatataataaccataaaaaaacatccaacacctttacaaaaataaaacacacaaacttcaaaaccaactatcacccttaaaactaaattcatccccaactctcc

SEQ ID NO: 1708 - DNA, 120 bp, synthetic construct
  source 1..120: mol_type = other DNA
ggttagggatttttattatataatgattatgaaaggatatttggtatttttatgaaggtgaagtgtataggttttagagttagttgttatttttgaggttgggtttatttttgatttttt

SEQ ID NO: 1709 - DNA, 120 bp, synthetic construct
  source 1..120: mol_type = other DNA
aatcaaaaactttcattatataataaccataaaaaaacatccgacacctttacgaaattaaaaaacacaaacttcaaaaccaactatcacccttaaaactaaattcatccccgactctcc

SEQ ID NO: 1710 - DNA, 120 bp, synthetic construct
  source 1..120: mol_type = other DNA
ggttagggatttttattatataatgattatgaaaggatattcggtatttttacgaagttgaagagtataggttttagagttagttgttatttttgaggttgggtttattttcgatttttc

SEQ ID NO: 1711 - DNA, 120 bp, synthetic construct
  source 1..120: mol_type = other DNA
aatcaaaaactttcattatataataaccataaaaaaacatccgacacctttacgaaaataaaacgcacaaacttcaaaaccaactatcacccttaaaactaaattcatccccgactctcc

SEQ ID NO: 1712 - DNA, 120 bp, synthetic construct
  source 1..120: mol_type = other DNA
ggttagggatttttattatataatgattatgaaaggatattcggtatttttacgaaggtgaagcgtataggttttagagttagttgttatttttgaggttgggtttattttcgatttttc

SEQ ID NO: 1713 - DNA, 120 bp, synthetic construct
  source 1..120: mol_type = other DNA
ttcctctaaataaactacaaaacactaactaaatataaaatacaaaataaaacaaattaaaaatacaaacttctaaactacttcttactaaacataatcataaacacatttcttcacctc

SEQ ID NO: 1714 - DNA, 120 bp, synthetic construct
  source 1..120: mol_type = other DNA
tttttttgggtgggttgtagagtattggttgagtgtgggatgtagggtgaagtagattgggggtataagtttttgggttgttttttgttaagtatgattatggatatatttttttatttt

SEQ ID NO: 1715 - DNA, 120 bp, synthetic construct
  source 1..120: mol_type = other DNA
ttcctctaaataaactacaaaacactaactaaatataaaatacaaaataaaacaaattatacatacaaacttctaaactacttcttactaaacataatcataaacacatttcttcacctc

SEQ ID NO: 1716 - DNA, 120 bp, synthetic construct
  source 1..120: mol_type = other DNA
tttttttgggtgggttgtagagtattggttgagtgtgggatgtagggtgaagtagattgtgtgtataagtttttgggttgttttttgttaagtatgattatggatatatttttttatttt

SEQ ID NO: 1717 - DNA, 120 bp, synthetic construct; identical to SEQ ID NO: 1713
  source 1..120: mol_type = other DNA

SEQ ID NO: 1718 - DNA, 120 bp, synthetic construct; identical to SEQ ID NO: 1714
  source 1..120: mol_type = other DNA

SEQ ID NO: 1719 - DNA, 120 bp, synthetic construct
  source 1..120: mol_type = other DNA
ttcctctaaataaactacaaaacactaactaaatataaaatacaaaataaaacaaattatacgtacaaacttctaaactacttcttactaaacataatcataaacacatttcttcacctc

SEQ ID NO: 1720 - DNA, 120 bp, synthetic construct
  source 1..120: mol_type = other DNA
tttttttgggtgggttgtagagtattggttgagtgtgggatgtagggtgaagtagattgtgcgtataagtttttgggttgttttttgttaagtatgattatggatatatttttttatttt

SEQ ID NO: 1721 - DNA, 120 bp, synthetic construct
  source 1..120: mol_type = other DNA
ccatttcactcacaataatcttatatcaaaaatttaaaaaaaatattacaaaaaactaatccacaaataaaaaacaaaccattaacctacctcatataataaaatttatatctctaatta

SEQ ID NO: 1722 - DNA, 120 bp, synthetic construct
  source 1..120: mol_type = other DNA
ttattttatttataatggttttgtgttaaaaatttaagaaagatattgtagaaaattagtttatgggtggaaggtagattattgatttattttgtatagtaaaatttatgtttttgatta

SEQ ID NO: 1723 - DNA, 120 bp, synthetic construct
  source 1..120: mol_type = other DNA
ccatttcactcacaataatcttatatcaaaaatttaaaaaaaatattacaaaaaactaaacaacaaataaaaaacaaaccattaacctacctcatataataaaatttatatctctaatta

SEQ ID NO: 1724 - DNA, 120 bp, synthetic construct
  source 1..120: mol_type = other DNA
ttattttatttataatggttttgtgttaaaaatttaagaaagatattgtagaaaattagataatgggtggaaggtagattattgatttattttgtatagtaaaatttatgtttttgatta

SEQ ID NO: 1725 - DNA, 120 bp, synthetic construct
  source 1..120: mol_type = other DNA
ccatttcactcacaataatcttatatcaaaaatttaaaaaaaatattacaaaaaactaatccacgaataaaaaacaaaccattaacctacctcgtataataaaatttatatctctaatta

SEQ ID NO: 1726 - DNA, 120 bp, synthetic construct
  source 1..120: mol_type = other DNA
ttattttatttataatggttttgtgttaaaaatttaagaaagatattgtagaaaattagtttacgggtggaaggtagattattgatttatttcgtatagtaaaatttatgtttttgatta

SEQ ID NO: 1727 - DNA, 120 bp, synthetic construct
  source 1..120: mol_type = other DNA
ccatttcactcacaataatcttatatcaaaaatttaaaaaaaatattacaaaaaactaaacaacgaataaaaaacaaaccattaacctacctcgtataataaaatttatatctctaatta

SEQ ID NO: 1728 - DNA, 120 bp, synthetic construct
  source 1..120: mol_type = other DNA
ttattttatttataatggttttgtgttaaaaatttaagaaagatattgtagaaaattagataacgggtggaaggtagattattgatttatttcgtatagtaaaatttatgtttttgatta

SEQ ID NO: 1729 - DNA, 120 bp, synthetic construct
  source 1..120: mol_type = other DNA
caaactaccatcctaaaacataactataaccaaaaaaaaaaccttatccaacttcctaacatctaaaaaatttatttaaacctaaaaaaaatataaacacctaactcacacctaactcca

SEQ ID NO: 1730 - DNA, 120 bp, synthetic construct
  source 1..120: mol_type = other DNA
taggttgttattttggagtatagttgtggttagagaaaaggttttgtttagttttttggtatttaaggggtttgtttgggtttgggagagatgtgaatatttggtttatatttggtttta

SEQ ID NO: 1731 - DNA, 120 bp, synthetic construct
  source 1..120: mol_type = other DNA
caaactaccatcctaaaacataactataaccaaaaaaaaaaccttatccaacttcctaaaaactaaaaaatttatttaaacctaaaaaaaatataaacacctaactcacacctaactcca

SEQ ID NO: 1732 - DNA, 120 bp, synthetic construct
  source 1..120: mol_type = other DNA
taggttgttattttggagtatagttgtggttagagaaaaggttttgtttagttttttgggaattaaggggtttgtttgggtttgggagagatgtgaatatttggtttatatttggtttta

SEQ ID NO: 1733 - DNA, 120 bp, synthetic construct; identical to SEQ ID NO: 1729
  source 1..120: mol_type = other DNA

SEQ ID NO: 1734 - DNA, 120 bp, synthetic construct; identical to SEQ ID NO: 1730
  source 1..120: mol_type = other DNA

SEQ ID NO: 1735 - DNA, 120 bp, synthetic construct; identical to SEQ ID NO: 1731
  source 1..120: mol_type = other DNA

SEQ ID NO: 1736 - DNA, 120 bp, synthetic construct; identical to SEQ ID NO: 1732
  source 1..120: mol_type = other DNA

SEQ ID NO: 1737 - DNA, 120 bp, synthetic construct
  source 1..120: mol_type = other DNA
taactaaatttaaaaacaaaaactaatatcacaaaaaacaaattctataaatacctattctataaaacaatataacttaacaataaaaaataaacaaacaacctaatattaaatcctaat

SEQ ID NO: 1738 - DNA, 120 bp, synthetic construct
  source 1..120: mol_type = other DNA
tggttggatttaagagtaggggttaatgttatagggagtaaattttatagatgtttgttttatgaggtagtatagtttaatgataaggagtagatagataatttaatgttaaattttagt

SEQ ID NO: 1739 - DNA, 120 bp, synthetic construct
  source 1..120: mol_type = other DNA
taactaaatttaaaaacaaaaactaatatcacaaaaaacaaattctataaatacctaatctatacaacaatataacttaacaataaaaaataaacaaacaacctaatattaaatcctaat

SEQ ID NO: 1740 - DNA, 120 bp, synthetic construct
  source 1..120: mol_type = other DNA
tggttggatttaagagtaggggttaatgttatagggagtaaattttatagatgtttggtttatgtggtagtatagtttaatgataaggagtagatagataatttaatgttaaattttagt

SEQ ID NO: 1741 - DNA, 120 bp, synthetic construct
  source 1..120: mol_type = other DNA
taactaaatttaaaaacaaaaactaatatcacaaaaaacaaattctataaatacctattctataaaacaatataacttaacgataaaaaataaacaaacaacctaatattaaatcctaat

SEQ ID NO: 1742 - DNA, 120 bp, synthetic construct
  source 1..120: mol_type = other DNA
tggttggatttaagagtaggggttaatgttatagggagtaaattttatagatgtttgttttatgaggtagtatagtttaacgataaggagtagatagataatttaatgttaaattttagt

SEQ ID NO: 1743 - DNA, 120 bp, synthetic construct
  source 1..120: mol_type = other DNA
taactaaatttaaaaacaaaaactaatatcacaaaaaacaaattctataaatacctaatctatacgacaatataacttaacgataaaaaataaacaaacaacctaatattaaatcctaat

SEQ ID NO: 1744 - DNA, 120 bp, synthetic construct
  source 1..120: mol_type = other DNA
tggttggatttaagagtaggggttaatgttatagggagtaaattttatagatgtttggtttatgcggtagtatagtttaacgataaggagtagatagataatttaatgttaaattttagt

SEQ ID NO: 1745 - DNA, 120 bp, synthetic construct
  source 1..120: mol_type = other DNA
ttataaatctatatttttccctaatcttccctacattccccacaacctatatttaataccaaaacattctaacacaactctctccatcctaaaataaaaaaaacttactaaatatatccc

SEQ ID NO: 1746 - DNA, 120 bp, synthetic construct
  source 1..120: mol_type = other DNA
ttatgggtttgtgtttttttttggttttttttatattttttataatttgtgtttgatgttagaatattttgatatagttttttttattttgaagtaagggaaatttattgaatgtgtttt

SEQ ID NO: 1747 - DNA, 120 bp, synthetic construct
  source 1..120: mol_type = other DNA
ttataaatctatatttttccctaatcttccctacattccccacaacctatatttaataacaaaccattctaacacaactctctccatcctaaaataaaaaaaacttactaaatatatccc

SEQ ID NO: 1748 - DNA, 120 bp, synthetic construct
  source 1..120: mol_type = other DNA
ttatgggtttgtgtttttttttggttttttttatattttttataatttgtgtttgatgatagattattttgatatagttttttttattttgaagtaagggaaatttattgaatgtgtttt

SEQ ID NO: 1749 - DNA, 120 bp, synthetic construct; identical to SEQ ID NO: 1745
  source 1..120: mol_type = other DNA

SEQ ID NO: 1750 - DNA, 120 bp, synthetic construct; identical to SEQ ID NO: 1746
  source 1..120: mol_type = other DNA

SEQ ID NO: 1751 - DNA, 120 bp, synthetic construct; identical to SEQ ID NO: 1747
  source 1..120: mol_type = other DNA

SEQ ID NO: 1752 - DNA, 120 bp, synthetic construct; identical to SEQ ID NO: 1748
  source 1..120: mol_type = other DNA

SEQ ID NO: 1753 - DNA, 120 bp, synthetic construct
  source 1..120: mol_type = other DNA
cctctcctaaaaaaaaaatctaatatcctcaactaactcctctccaccttcacttctacccaaaaactccaatacatctaactttatctctaaaataaaccatacaaccctaatcatcta

SEQ ID NO: 1754 - DNA, 120 bp, synthetic construct
  source 1..120: mol_type = other DNA
ttttttttaggggaggggtttggtgtttttagttggtttttttttatttttgtttttatttgggggttttagtgtatttggttttatttttggggtgagttatgtggttttggttatttg

SEQ ID NO: 1755 - DNA, 120 bp, synthetic construct
  source 1..120: mol_type = other DNA
cctctcctaaaaaaaaaatctaatatcctcaactaactcctctccaccttcacttctaaccaataactccaatacatctaactttatctctaaaataaaccatacaaccctaatcatcta

SEQ ID NO: 1756 - DNA, 120 bp, synthetic construct
  source 1..120: mol_type = other DNA
ttttttttaggggaggggtttggtgtttttagttggtttttttttatttttgtttttagttggtggttttagtgtatttggttttatttttggggtgagttatgtggttttggttatttg

SEQ ID NO: 1757 - DNA, 120 bp, synthetic construct
  source 1..120: mol_type = other DNA
cctctcctaaaaaaaaaatctaatatcctcaactaactcctctccaccttcgcttctacccgaaaactccaatacatctaactttatctctaaaataaaccatacgaccctaatcatcta

SEQ ID NO: 1758 - DNA, 120 bp, synthetic construct
  source 1..120: mol_type = other DNA
ttttttttaggggaggggtttggtgtttttagttggtttttttttattttcgtttttattcgggggttttagtgtatttggttttatttttggggtgagttatgcggttttggttatttg

SEQ ID NO: 1759 - DNA, 120 bp, synthetic construct
  source 1..120: mol_type = other DNA
cctctcctaaaaaaaaaatctaatatcctcaactaactcctctccaccttcgcttctaaccgataactccaatacatctaactttatctctaaaataaaccatacgaccctaatcatcta

SEQ ID NO: 1760 - DNA, 120 bp, synthetic construct
  source 1..120: mol_type = other DNA
ttttttttaggggaggggtttggtgtttttagttggtttttttttattttcgtttttagtcggtggttttagtgtatttggttttatttttggggtgagttatgcggttttggttatttg

SEQ ID NO: 1761 - DNA, 120 bp, synthetic construct
  source 1..120: mol_type = other DNA
attatcatactaaccatcaacccaaaaaacaaattacaataactaataacaaaaaaaaataatcacaatatttttaaaaaattacttaaaaacaactttatcaacaaaaaccactcaaat

SEQ ID NO: 1762 - DNA, 120 bp, synthetic construct
  source 1..120: mol_type = other DNA
attattgtgttgattattagtttagaaaataaattatggtagttaatgatagggaagagtaattataatgtttttagaaaattatttggaaataattttgttaatagagattatttaaat

SEQ ID NO: 1763 - DNA, 120 bp, synthetic construct
  source 1..120: mol_type = other DNA
attatcatactaaccatcaacccaaaaaacaaattacaataactaataacaaaaaacaataatcaaaatatttttaaaaaattacttaaaaacaactttatcaacaaaaaccactcaaat

SEQ ID NO: 1764 - DNA, 120 bp, synthetic construct
  source 1..120: mol_type = other DNA
attattgtgttgattattagtttagaaaataaattatggtagttaatgatagggaatagtaattagaatgtttttagaaaattatttggaaataattttgttaatagagattatttaaat

SEQ ID NO: 1765 - DNA, 120 bp, synthetic construct
  source 1..120: mol_type = other DNA
attatcgtactaaccatcaacccaaaaaacaaattacgataactaataacaaaaaaaaataatcacaatatttttaaaaaattacttaaaaacaactttatcaacaaaaaccactcaaat

SEQ ID NO: 1766 - DNA, 120 bp, synthetic construct
  source 1..120: mol_type = other DNA
attatcgtgttgattattagtttagaaaataaattacggtagttaatgatagggaagagtaattataatgtttttagaaaattatttggaaataattttgttaatagagattatttaaat

SEQ ID NO: 1767 - DNA, 120 bp, synthetic construct
  source 1..120: mol_type = other DNA
attatcgtactaaccatcaacccaaaaaacaaattacgataactaataacaaaaaacaataatcaaaatatttttaaaaaattacttaaaaacaactttatcaacaaaaaccactcaaat

SEQ ID NO: 1768 - DNA, 120 bp, synthetic construct
  source 1..120: mol_type = other DNA
attatcgtgttgattattagtttagaaaataaattacggtagttaatgatagggaatagtaattagaatgtttttagaaaattatttggaaataattttgttaatagagattatttaaat

SEQ ID NO: 1769 - DNA, 120 bp, synthetic construct
  source 1..120: mol_type = other DNA
taatattactaattactaacaaacacatcaatccatttatttaccttaccctaaaaaaattttaaaattatcaattctatttattaatttctaataaaaaaccaaaacttatcccataaa

SEQ ID NO: 1770 - DNA, 120 bp, synthetic construct
  source 1..120: mol_type = other DNA
tggtattgttaattgttggtagatatattaatttatttgtttgttttattttagagggattttaaagttattaattttatttgttggtttttaatagaaagttagggtttattttataaa

SEQ ID NO: 1771 - DNA, 120 bp, synthetic construct
  source 1..120: mol_type = other DNA
taatattactaattactaacaaacacatcaatccatttatttaccttaccctaaaataattttacaattatcaattctatttattaatttctaataaaaaaccaaaacttatcccataaa

SEQ ID NO: 1772 - DNA, 120 bp, synthetic construct
  source 1..120: mol_type = other DNA
tggtattgttaattgttggtagatatattaatttatttgtttgttttattttagagtgattttatagttattaattttatttgttggtttttaatagaaagttagggtttattttataaa

SEQ ID NO: 1773 - DNA, 120 bp, synthetic construct; identical to SEQ ID NO: 1769
  source 1..120: mol_type = other DNA

SEQ ID NO: 1774 - DNA, 120 bp, synthetic construct; identical to SEQ ID NO: 1770
  source 1..120: mol_type = other DNA

SEQ ID NO: 1775 - DNA, 120 bp, synthetic construct; identical to SEQ ID NO: 1771
  source 1..120: mol_type = other DNA

SEQ ID NO: 1776 - DNA, 120 bp, synthetic construct; identical to SEQ ID NO: 1772
  source 1..120: mol_type = other DNA

SEQ ID NO: 1777 - DNA, 120 bp, synthetic construct
  source 1..120: mol_type = other DNA
aactaacaaacaccctcctcaaaaaaaaacaactactaccaaaacccataacatacccatccttactatctaaaataatctctccaacactacaacaaaaaaccaatcaaaaacctaaat

SEQ ID NO: 1778 - DNA, 120 bp, synthetic construct
  source 1..120: mol_type = other DNA
agttggtaaatgttttttttaggaagggatagttgttgttgggatttatggtatgtttgtttttgttgtttgaggtggtttttttaatgttgtaatagggggttagttaggggtttgggt

SEQ ID NO: 1779 - DNA, 120 bp, synthetic construct
  source 1..120: mol_type = other DNA
aactaacaaacaccctcctcaaaaaaaaacaactactaccaaaacccataacataaccatccttaatatctaaaataatctctccaacactacaacaaaaaaccaatcaaaaacctaaat

SEQ ID NO: 1780 - DNA, 120 bp, synthetic construct
  source 1..120: mol_type = other DNA
agttggtaaatgttttttttaggaagggatagttgttgttgggatttatggtatgattgtttttggtgtttgaggtggtttttttaatgttgtaatagggggttagttaggggtttgggt

SEQ ID NO: 1781 - DNA, 120 bp, synthetic construct
  source 1..120: mol_type = other DNA
aactaacaaacgccctcctcaaaaaaaaacaactactaccgaaacccataacatacccgtccttactatctaaaataatctctccaacgctacaacaaaaaaccaatcaaaaacctaaat

SEQ ID NO: 1782 - DNA, 120 bp, synthetic construct
  source 1..120: mol_type = other DNA
agttggtaaacgttttttttaggaagggatagttgttgtcgggatttatggtatgttcgtttttgttgtttgaggtggtttttttaacgttgtaatagggggttagttaggggtttgggt

SEQ ID NO: 1783 - DNA, 120 bp, synthetic construct
  source 1..120: mol_type = other DNA
aactaacaaacgccctcctcaaaaaaaaacaactactaccgaaacccataacataaccgtccttaatatctaaaataatctctccaacgctacaacaaaaaaccaatcaaaaacctaaat

SEQ ID NO: 1784 - DNA, 120 bp, synthetic construct
  source 1..120: mol_type = other DNA
agttggtaaacgttttttttaggaagggatagttgttgtcgggatttatggtatgatcgtttttggtgtttgaggtggtttttttaacgttgtaatagggggttagttaggggtttgggt

SEQ ID NO: 1785 - DNA, 120 bp, synthetic construct
  source 1..120: mol_type = other DNA
aactacaatataacaaaattaaataaattatctaaaattacaatcacccaataaaaaaactaatacccaaaaccaaattaccttcctctaaattccatactatcattcaatacacaataa

SEQ ID NO: 1786 - DNA, 120 bp, synthetic construct
  source 1..120: mol_type = other DNA
aattataatatagtgaggttaaataaattgtttaaggttatagttatttaatggaagaattggtatttaaagttaagttatttttttttagattttatattgttatttaatatataataa

SEQ ID NO: 1787 - DNA, 120 bp, synthetic construct
  source 1..120: mol_type = other DNA
aactacaatataacaaaattaaataaattatctaaaattacaatcacccaataaaaaatctaaaacccaaaaccaaattaccttcctctaaattccatactatcattcaatacacaataa

SEQ ID NO: 1788 - DNA, 120 bp, synthetic construct
  source 1..120: mol_type = other DNA
aattataatatagtgaggttaaataaattgtttaaggttatagttatttaatggaagatttgggatttaaagttaagttatttttttttagattttatattgttatttaatatataataa

SEQ ID NO: 1789 - DNA, 120 bp, synthetic construct
  source 1..120: mol_type = other DNA
aactacaatataacgaaattaaataaattatctaaaattacaatcacccaataaaaaaactaatacccaaaaccaaattaccttcctctaaattccatactatcattcaatacacaataa

SEQ ID NO: 1790 - DNA, 120 bp, synthetic construct
  source 1..120: mol_type = other DNA
aattataatatagcgaggttaaataaattgtttaaggttatagttatttaatggaagaattggtatttaaagttaagttatttttttttagattttatattgttatttaatatataataa

SEQ ID NO: 1791 - DNA, 120 bp, synthetic construct
  source 1..120: mol_type = other DNA
aactacaatataacgaaattaaataaattatctaaaattacaatcacccaataaaaaatctaaaacccaaaaccaaattaccttcctctaaattccatactatcattcaatacacaataa

SEQ ID NO: 1792 - DNA, 120 bp, synthetic construct
  source 1..120: mol_type = other DNA
aattataatatagcgaggttaaataaattgtttaaggttatagttatttaatggaagatttgggatttaaagttaagttatttttttttagattttatattgttatttaatatataataa

SEQ ID NO: 1793 - DNA, 120 bp, synthetic construct
  source 1..120: mol_type = other DNA
atacatatcatttttataataaaaaaaaaataaaataaaattcttatatcaaatacaaaatttatcaacataccaaaacatacacctacctatcaaatcccaaaacatacattaacaaat

SEQ ID NO: 1794 - DNA, 120 bp, synthetic construct
  source 1..120: mol_type = other DNA
atatatattatttttataatgggagaaaagtaaaatagaatttttatattagatatagaatttgttagtatattaaggtatgtatttgtttgttagattttaaggtatgtattaataggt

SEQ ID NO: 1795 - DNA, 120 bp, synthetic construct
  source 1..120: mol_type = other DNA
atacatatcatttttataataaaaaaaaaataaaataaaattcttatatcaaatactaaatttataaacataccaaaacatacacctacctatcaaatcccaaaacatacattaacaaat

SEQ ID NO: 1796 - DNA, 120 bp, synthetic construct
  source 1..120: mol_type = other DNA
atatatattatttttataatgggagaaaagtaaaatagaatttttatattagatattgaatttgtgagtatattaaggtatgtatttgtttgttagattttaaggtatgtattaataggt

SEQ ID NO: 1797 - DNA, 120 bp, synthetic construct; identical to SEQ ID NO: 1793
  source 1..120: mol_type = other DNA

SEQ ID NO: 1798 - DNA, 120 bp, synthetic construct; identical to SEQ ID NO: 1794
  source 1..120: mol_type = other DNA

SEQ ID NO: 1799 - DNA, 120 bp, synthetic construct; identical to SEQ ID NO: 1795
  source 1..120: mol_type = other DNA

SEQ ID NO: 1800 - DNA, 120 bp, synthetic construct; identical to SEQ ID NO: 1796
  source 1..120: mol_type = other DNA

SEQ ID NO: 1801 - DNA, 120 bp, synthetic construct
  source 1..120: mol_type = other DNA
taaaaacaaaaatcaaaccttatatcttcaaacattaaccaaattaaatatttccttccctctctcaataaaacacttccaaaaactttccaatctctcacttaaaactaaaatttaaat

SEQ ID NO: 1802 - DNA, 120 bp, synthetic construct
  source 1..120: mol_type = other DNA
tagagataagagttaagttttgtgtttttaagtattgattaagttaagtgttttttttttttttttaataagatatttttaggagttttttaattttttatttaaaattaaggtttgaat

SEQ ID NO: 1803 - DNA, 120 bp, synthetic construct
  source 1..120: mol_type = other DNA
taaaaacaaaaatcaaaccttatatcttcaaacattaaccaaattaaatatttcctaccctctctaaataaaacacttccaaaaactttccaatctctcacttaaaactaaaatttaaat

SEQ ID NO: 1804 - DNA, 120 bp, synthetic construct
  source 1..120: mol_type = other DNA
tagagataagagttaagttttgtgtttttaagtattgattaagttaagtgttttttgttttttttgaataagatatttttaggagttttttaattttttatttaaaattaaggtttgaat

SEQ ID NO: 1805 - DNA, 120 bp, synthetic construct; identical to SEQ ID NO: 1801
  source 1..120: mol_type = other DNA

SEQ ID NO: 1806 - DNA, 120 bp, synthetic construct; identical to SEQ ID NO: 1802
  source 1..120: mol_type = other DNA

SEQ ID NO: 1807 - DNA, 120 bp, synthetic construct; identical to SEQ ID NO: 1803
  source 1..120: mol_type = other DNA

SEQ ID NO: 1808 - DNA, 120 bp, synthetic construct; identical to SEQ ID NO: 1804
  source 1..120: mol_type = other DNA

SEQ ID NO: 1809 - DNA, 120 bp, synthetic construct
  source 1..120: mol_type = other DNA
tacaaaattttattttaaaaataaacaaataaataaaaaaccaaataaaaaataataatttctaacaaaaaaacttttttaaaataaaacataacataaaattaattaaacatctcttat

SEQ ID NO: 1810 - DNA, 120 bp, synthetic construct
  source 1..120: mol_type = other DNA
tatagaattttgttttggggatgggtaagtggatgaggggttaagtaagaagtaatggtttttagtagggaagtttttttaaagtagaatatgatataaaattggttagatgttttttgt

SEQ ID NO: 1811 - DNA, 120 bp, synthetic construct
  source 1..120: mol_type = other DNA
tacaaaattttattttaaaaataaacaaataaataaaaaaccaaataaaaaataattatttctaaaaaaaaaacttttttaaaataaaacataacataaaattaattaaacatctcttat

SEQ ID NO: 1812 - DNA, 120 bp, synthetic construct
  source 1..120: mol_type = other DNA
tatagaattttgttttggggatgggtaagtggatgaggggttaagtaagaagtaattgtttttaggagggaagtttttttaaagtagaatatgatataaaattggttagatgttttttgt

SEQ ID NO: 1813 - DNA, 120 bp, synthetic construct
  source 1..120: mol_type = other DNA
tacaaaattttattttaaaaataaacaaataaataaaaaaccaaataaaaaataataatttctaacaaaaaaacttttttaaaataaaacataacataaaattaattaaacgtctcttat

SEQ ID NO: 1814 - DNA, 120 bp, synthetic construct
  source 1..120: mol_type = other DNA
tatagaattttgttttggggatgggtaagtggatgaggggttaagtaagaagtaatggtttttagtagggaagtttttttaaagtagaatatgatataaaattggttagacgttttttgt

SEQ ID NO: 1815 - DNA, 120 bp, synthetic construct
  source 1..120: mol_type = other DNA
tacaaaattttattttaaaaataaacaaataaataaaaaaccaaataaaaaataattatttctaaaaaaaaaacttttttaaaataaaacataacataaaattaattaaacgtctcttat

SEQ ID NO: 1816 - DNA, 120 bp, synthetic construct
  source 1..120: mol_type = other DNA
tatagaattttgttttggggatgggtaagtggatgaggggttaagtaagaagtaattgtttttaggagggaagtttttttaaagtagaatatgatataaaattggttagacgttttttgt

SEQ ID NO: 1817 - DNA, 120 bp, synthetic construct
  source 1..120: mol_type = other DNA
aaaaaaactaaactcacacctactaacaaccaatccacaaaacctacccaaaaactcaaacacacaactaaaatcacatcccacaaaaaacatcctcaccaactaacaatcaacacaaat

SEQ ID NO: 1818 - DNA, 120 bp, synthetic construct
  source 1..120: mol_type = other DNA
ggggggattggatttatatttgttaatggttagtttataggatttgtttagaggtttggatatatagttgaagttatattttatggggagtatttttattaattgataattagtatgggt

SEQ ID NO: 1819 - DNA, 120 bp, synthetic construct
  source 1..120: mol_type = other DNA
aaaaaaactaaactcacacctactaacaaccaatccacaaaacctacccaaaaactaaaacacaccactaaaatcacatcccacaaaaaacatcctcaccaactaacaatcaacacaaat

SEQ ID NO: 1820 - DNA, 120 bp, synthetic construct
  source 1..120: mol_type = other DNA
ggggggattggatttatatttgttaatggttagtttataggatttgtttagaggttgggatatattgttgaagttatattttatggggagtatttttattaattgataattagtatgggt

SEQ ID NO: 1821 - DNA, 120 bp, synthetic construct
  source 1..120: mol_type = other DNA
aaaaaaactaaactcacacctactaacgaccaatccacaaaacctacccaaaaactcgaacacacaactaaaatcacatcccacgaaaaacatcctcaccaactaacaatcaacacgaat

SEQ ID NO: 1822 - DNA, 120 bp, synthetic construct
  source 1..120: mol_type = other DNA
ggggggattggatttatatttgttaacggttagtttataggatttgtttagaggttcggatatatagttgaagttatattttacggggagtatttttattaattgataattagtacgggt

SEQ ID NO: 1823 - DNA, 120 bp, synthetic construct
  source 1..120: mol_type = other DNA
aaaaaaactaaactcacacctactaacgaccaatccacaaaacctacccaaaaactaaaacacaccgctaaaatcacatcccacgaaaaacatcctcaccaactaacaatcaacacgaat

SEQ ID NO: 1824 - DNA, 120 bp, synthetic construct
  source 1..120: mol_type = other DNA
ggggggattggatttatatttgttaacggttagtttataggatttgtttagaggttgggatatatcgttgaagttatattttacggggagtatttttattaattgataattagtacgggt

SEQ ID NO: 1825 - DNA, 120 bp, synthetic construct
  source 1..120: mol_type = other DNA
aaaactaaataaaactaaaaataaaaaaaaaaaacaaaacaataaacaaataaccctaaacttcctacaataaaaacaaataaaaatctataaacctctttccctaactaccctacccct

SEQ ID NO: 1826 - DNA, 120 bp, synthetic construct
  source 1..120: mol_type = other DNA
aagattgggtgaggttgggaatgggagaaagaggtaggataatgggtagatagttttgggttttttgtagtgagggtagataggggtttgtgagtttttttttttggttgttttgttttt

SEQ ID NO: 1827 - DNA, 120 bp, synthetic construct
  source 1..120: mol_type = other DNA
aaaactaaataaaactaaaaataaaaaaaaaaaacaaaacaataaacaaataaccctcaacttactacaataaaaacaaataaaaatctataaacctctttccctaactaccctacccct

SEQ ID NO: 1828 - DNA, 120 bp, synthetic construct
  source 1..120: mol_type = other DNA
aagattgggtgaggttgggaatgggagaaagaggtaggataatgggtagatagtttttggtttgttgtagtgagggtagataggggtttgtgagtttttttttttggttgttttgttttt

SEQ ID NO: 1829 - DNA, 120 bp, synthetic construct; identical to SEQ ID NO: 1825
  source 1..120: mol_type = other DNA

SEQ ID NO: 1830 - DNA, 120 bp, synthetic construct; identical to SEQ ID NO: 1826
  source 1..120: mol_type = other DNA

SEQ ID NO: 1831 - DNA, 120 bp, synthetic construct
  source 1..120: mol_type = other DNA
aaaactaaataaaactaaaaataaaaaaaaaaaacaaaacaataaacaaataaccctcgacttactacaataaaaacaaataaaaatctataaacctctttccctaactaccctacccct

SEQ ID NO: 1832 - DNA, 120 bp, synthetic construct
  source 1..120: mol_type = other DNA
aagattgggtgaggttgggaatgggagaaagaggtaggataatgggtagatagttttcggtttgttgtagtgagggtagataggggtttgtgagtttttttttttggttgttttgttttt

SEQ ID NO: 1833 - DNA, 120 bp, synthetic construct
  source 1..120: mol_type = other DNA
tccccaaactaatatatttaacctataaaaaacccaaaaccatacactaatttctaattcaaaacataaactcattatataaaataacaacccaacctcacaaaacattttctctcaata

SEQ ID NO: 1834 - DNA, 120 bp, synthetic construct
  source 1..120: mol_type = other DNA
tttttagattggtgtatttggtttgtgggagatttagagttatatattagtttttaatttaaagtatgggtttattgtataggatagtagtttaattttataagatgtttttttttagtg

SEQ ID NO: 1835 - DNA, 120 bp, synthetic construct
  source 1..120: mol_type = other DNA
tccccaaactaatatatttaacctataaaaaacccaaaaccatacactaatttctaaatcaaaaaataaactcattatataaaataacaacccaacctcacaaaacattttctctcaata

SEQ ID NO: 1836 - DNA, 120 bp, synthetic construct
  source 1..120: mol_type = other DNA
tttttagattggtgtatttggtttgtgggagatttagagttatatattagtttttaagttaaaggatgggtttattgtataggatagtagtttaattttataagatgtttttttttagtg

SEQ ID NO: 1837 - DNA, 120 bp, synthetic construct
  source 1..120: mol_type = other DNA
tccccaaactaatatatttaacctataaaaaacccaaaaccatacactaatttctaattcaaaacataaactcattatataaaataacaacccaacctcacaaaacgttttctctcaata

SEQ ID NO: 1838 - DNA, 120 bp, synthetic construct
  source 1..120: mol_type = other DNA
tttttagattggtgtatttggtttgtgggagatttagagttatatattagtttttaatttaaagtatgggtttattgtataggatagtagtttaattttataagacgtttttttttagtg

SEQ ID NO: 1839 - DNA, 120 bp, synthetic construct
  source 1..120: mol_type = other DNA
tccccaaactaatatatttaacctataaaaaacccaaaaccatacactaatttctaaatcaaaaaataaactcattatataaaataacaacccaacctcacaaaacgttttctctcaata

SEQ ID NO: 1840 - DNA, 120 bp, synthetic construct
  source 1..120: mol_type = other DNA
tttttagattggtgtatttggtttgtgggagatttagagttatatattagtttttaagttaaaggatgggtttattgtataggatagtagtttaattttataagacgtttttttttagtg

SEQ ID NO: 1841 - DNA, 120 bp, synthetic construct
  source 1..120: mol_type = other DNA
aacattcactctaacccaaataaaaatcaataacttctaataatcaaaactctaatattttaacctaatttaaaaaaaaactctaattataataaatacaataaaattataattaaaaaa

SEQ ID NO: 1842 - DNA, 120 bp, synthetic construct
  source 1..120: mol_type = other DNA
agtatttattttaatttaagtaagggttagtgatttttggtgattagggttttagtattttggtttaatttgaaggagggttttaattgtaatagatataatggaattatagttgggaaa

SEQ ID NO: 1843 - DNA, 120 bp, synthetic construct
  source 1..120: mol_type = other DNA
aacattcactctaacccaaataaaaatcaataacttctaataatcaaaactctaataatttaaactaatttaaaaaaaaactctaattataataaatacaataaaattataattaaaaaa

SEQ ID NO: 1844 - DNA, 120 bp, synthetic construct
  source 1..120: mol_type = other DNA
agtatttattttaatttaagtaagggttagtgatttttggtgattagggttttagtaatttggattaatttgaaggagggttttaattgtaatagatataatggaattatagttgggaaa

SEQ ID NO: 1845 - DNA, 120 bp, synthetic construct; identical to SEQ ID NO: 1841
  source 1..120: mol_type = other DNA

SEQ ID NO: 1846 - DNA, 120 bp, synthetic construct; identical to SEQ ID NO: 1842
  source 1..120: mol_type = other DNA

SEQ ID NO: 1847 - DNA, 120 bp, synthetic construct; identical to SEQ ID NO: 1843
  source 1..120: mol_type = other DNA

SEQ ID NO: 1848 - DNA, 120 bp, synthetic construct; identical to SEQ ID NO: 1844
  source 1..120: mol_type = other DNA

SEQ ID NO: 1849 - DNA, 120 bp, synthetic construct
  source 1..120: mol_type = other DNA
ccttatataaccctaaaaataaatacctatttaaaaataaatctccaaaatacaacatataataaaacaccaactctcaaatcatacaaaaacaaaataaacacaaacaacatatctctt

SEQ ID NO: 1850 - DNA, 120 bp, synthetic construct
  source 1..120: mol_type = other DNA
ttttgtgtgattttgaggatgagtgtttgtttaagaatgagtttttagggtgtaatatatagtgaggtattaatttttaggttatgtaaaagtagggtaggtatagatagtgtgtttttt

SEQ ID NO: 1851 - DNA, 120 bp, synthetic construct
  source 1..120: mol_type = other DNA
ccttatataaccctaaaaataaatacctatttaaaaataaatctccaaaatacaacatttaaaaaaacaccaactctcaaatcatacaaaaacaaaataaacacaaacaacatatctctt

SEQ ID NO: 1852 - DNA, 120 bp, synthetic construct
  source 1..120: mol_type = other DNA
ttttgtgtgattttgaggatgagtgtttgtttaagaatgagtttttagggtgtaatatttagggaggtattaatttttaggttatgtaaaagtagggtaggtatagatagtgtgtttttt

SEQ ID NO: 1853 - DNA, 120 bp, synthetic construct
  source 1..120: mol_type = other DNA
ccttatataaccctaaaaataaatacctatttaaaaataaatctccaaaatacaacatataataaaacaccaactctcaaatcatacaaaaacaaaataaacacaaacaacgtatctctt

SEQ ID NO: 1854 - DNA, 120 bp, synthetic construct
  source 1..120: mol_type = other DNA
ttttgtgtgattttgaggatgagtgtttgtttaagaatgagtttttagggtgtaatatatagtgaggtattaatttttaggttatgtaaaagtagggtaggtatagatagcgtgtttttt

SEQ ID NO: 1855 - DNA, 120 bp, synthetic construct
  source 1..120: mol_type = other DNA
ccttatataaccctaaaaataaatacctatttaaaaataaatctccaaaatacaacatttaaaaaaacaccaactctcaaatcatacaaaaacaaaataaacacaaacaacgtatctctt

SEQ ID NO: 1856 - DNA, 120 bp, synthetic construct
  source 1..120: mol_type = other DNA
ttttgtgtgattttgaggatgagtgtttgtttaagaatgagtttttagggtgtaatatttagggaggtattaatttttaggttatgtaaaagtagggtaggtatagatagcgtgtttttt

SEQ ID NO: 1857 - DNA, 120 bp, synthetic construct
  source 1..120: mol_type = other DNA
ataatataaaaaatatcaaaaaaaaaatacaatattaaataacataataaaaaaaaacaataaccttactaaaaaaataacatctaaacacaaaacctaaaaaataaaaaaactaaacct

SEQ ID NO: 1858 - DNA, 120 bp, synthetic construct
  source 1..120: mol_type = other DNA
gtgatgtagggaatgttagggaagaagtatagtgttaaatgatgtagtgggagaaggtggtgattttattgagaagatggtatttgagtatagagtttgaaggatgggaggattggattt

SEQ ID NO: 1859 - DNA, 120 bp, synthetic construct
  source 1..120: mol_type = other DNA
ataatataaaaaatatcaaaaaaaaaatacaatattaaataacataataaaaaaaaacattatccttactaaaaaaataacatctaaacacaaaacctaaaaaataaaaaaactaaacct

SEQ ID NO: 1860 - DNA, 120 bp, synthetic construct
  source 1..120: mol_type = other DNA
gtgatgtagggaatgttagggaagaagtatagtgttaaatgatgtagtgggagaaggtgttgtttttattgagaagatggtatttgagtatagagtttgaaggatgggaggattggattt

SEQ ID NO: 1861 - DNA, 120 bp, synthetic construct
  source 1..120: mol_type = other DNA
ataatataaaaaatatcaaaaaaaaaatacaatattaaataacgtaataaaaaaaaacgataaccttactaaaaaaataacatctaaacacaaaacctaaaaaataaaaaaactaaacct

SEQ ID NO: 1862 - DNA, 120 bp, synthetic construct
  source 1..120: mol_type = other DNA
gtgatgtagggaatgttagggaagaagtatagtgttaaatgacgtagtgggagaaggcggtgattttattgagaagatggtatttgagtatagagtttgaaggatgggaggattggattt

SEQ ID NO: 1863 - DNA, 120 bp, synthetic construct
  source 1..120: mol_type = other DNA
ataatataaaaaatatcaaaaaaaaaatacaatattaaataacgtaataaaaaaaaacgttatccttactaaaaaaataacatctaaacacaaaacctaaaaaataaaaaaactaaacct

SEQ ID NO: 1864 - DNA, 120 bp, synthetic construct
  source 1..120: mol_type = other DNA
gtgatgtagggaatgttagggaagaagtatagtgttaaatgacgtagtgggagaaggcgttgtttttattgagaagatggtatttgagtatagagtttgaaggatgggaggattggattt

SEQ ID NO: 1865 - DNA, 120 bp, synthetic construct
  source 1..120: mol_type = other DNA
tcttttttcaatccatcataaattaaaaaatacaaaatcatacatttaaataactataacaaatttttaaaaaatttttatatatttaattttattatttacatttatctcaatataaac

SEQ ID NO: 1866 - DNA, 120 bp, synthetic construct
  source 1..120: mol_type = other DNA
tttttttttaatttattatggattgaaaaatataaagttatgtatttggatggttataataggtttttagaaaatttttgtatatttaattttattgtttgtatttattttggtgtgaat

SEQ ID NO: 1867 - DNA, 120 bp, synthetic construct
  source 1..120: mol_type = other DNA
tcttttttcaatccatcataaattaaaaaatacaaaatcatacatttaaataactataaaaattttttaaaaaatttttatatatttaattttattatttacatttatctcaatataaac

SEQ ID NO: 1868 - DNA, 120 bp, synthetic construct
  source 1..120: mol_type = other DNA
tttttttttaatttattatggattgaaaaatataaagttatgtatttggatggttataaaagttttttagaaaatttttgtatatttaattttattgtttgtatttattttggtgtgaat

SEQ ID NO: 1869 - DNA, 120 bp, synthetic construct
  source 1..120: mol_type = other DNA
tcttttttcaatccatcataaattaaaaaatacaaaatcatacatttaaataactataacaaatttttaaaaaatttttatatatttaattttattatttacatttatctcgatataaac

SEQ ID NO: 1870 - DNA, 120 bp, synthetic construct
  source 1..120: mol_type = other DNA
tttttttttaatttattatggattgaaaaatataaagttatgtatttggatggttataataggtttttagaaaatttttgtatatttaattttattgtttgtatttatttcggtgtgaat

SEQ ID NO: 1871 - DNA, 120 bp, synthetic construct
  source 1..120: mol_type = other DNA
tcttttttcaatccatcataaattaaaaaatacaaaatcatacatttaaataactataaaaattttttaaaaaatttttatatatttaattttattatttacatttatctcgatataaac

SEQ ID NO: 1872 - DNA, 120 bp, synthetic construct
  source 1..120: mol_type = other DNA
tttttttttaatttattatggattgaaaaatataaagttatgtatttggatggttataaaagttttttagaaaatttttgtatatttaattttattgtttgtatttatttcggtgtgaat

SEQ ID NO: 1873 - DNA, 120 bp, synthetic construct
  source 1..120: mol_type = other DNA
atcaaacaaaaaactaaataacaatattatcaataaaaaaataacattaaaaaaaataacattaaaaacctacataaacttctacccctttttcctaaattctaaatcttaaaacccaca

SEQ ID NO: 1874 - DNA, 120 bp, synthetic construct
  source 1..120: mol_type = other DNA
gttaaataggagattgaataatagtattattaatggaaaaatggtattaggaaaagtgatattggagatttatatgaatttttattttttttttttaaattttagattttgggatttata

SEQ ID NO: 1875 - DNA, 120 bp, synthetic construct
  source 1..120: mol_type = other DNA
atcaaacaaaaaactaaataacaatattatcaataaaaaaataacattaaaaaaaataaaataaaaaacctacataaacttctacccctttttcctaaattctaaatcttaaaacccaca

SEQ ID NO: 1876 - DNA, 120 bp, synthetic construct
  source 1..120: mol_type = other DNA
gttaaataggagattgaataatagtattattaatggaaaaatggtattaggaaaagtgagatgggagatttatatgaatttttattttttttttttaaattttagattttgggatttata

SEQ ID NO: 1877 - DNA, 120 bp, synthetic construct; identical to SEQ ID NO: 1873
  source 1..120: mol_type = other DNA

SEQ ID NO: 1878 - DNA, 120 bp, synthetic construct; identical to SEQ ID NO: 1874
  source 1..120: mol_type = other DNA

SEQ ID NO: 1879 - DNA, 120 bp, synthetic construct; identical to SEQ ID NO: 1875
  source 1..120: mol_type = other DNA

SEQ ID NO: 1880 - DNA, 120 bp, synthetic construct; identical to SEQ ID NO: 1876
  source 1..120: mol_type = other DNA

SEQ ID NO: 1881 - DNA, 120 bp, synthetic construct
  source 1..120: mol_type = other DNA
ataaaccctataattactcaaaaccattataaaaaaaaccttccttccaaaatataatccccaaccatcttaaaaaacaataattaacatcaaaatcatttaaaaaatttcaaaacaaat

SEQ ID NO: 1882 - DNA, 120 bp, synthetic construct
  source 1..120: mol_type = other DNA
atgggttttgtagttgtttaagattattatgagaaaggttttttttttaaagtatgatttttgattattttgagagataatagttaatattaggattatttgggaaattttaggataaat

SEQ ID NO: 1883 - DNA, 120 bp, synthetic construct
  source 1..120: mol_type = other DNA
ataaaccctataattactcaaaaccattataaaaaaaaccttccttccaaaatataatccaaaaccatcttaaaaaacaataattaacatcaaaatcatttaaaaaatttcaaaacaaat

SEQ ID NO: 1884 - DNA, 120 bp, synthetic construct
  source 1..120: mol_type = other DNA
atgggttttgtagttgtttaagattattatgagaaaggttttttttttaaagtatgatttaggattattttgagagataatagttaatattaggattatttgggaaattttaggataaat

SEQ ID NO: 1885 - DNA, 120 bp, synthetic construct
  source 1..120: mol_type = other DNA
ataaaccctataattactcaaaaccattataaaaaaaaccttccttccaaaatataatccccgaccatcttaaaaaacaataattaacatcaaaatcatttaaaaaatttcaaaacaaat

SEQ ID NO: 1886 - DNA, 120 bp, synthetic construct
  source 1..120: mol_type = other DNA
atgggttttgtagttgtttaagattattatgagaaaggttttttttttaaagtatgattttcgattattttgagagataatagttaatattaggattatttgggaaattttaggataaat

SEQ ID NO: 1887 - DNA, 120 bp, synthetic construct; identical to SEQ ID NO: 1883
  source 1..120: mol_type = other DNA

SEQ ID NO: 1888 - DNA, 120 bp, synthetic construct; identical to SEQ ID NO: 1884
  source 1..120: mol_type = other DNA

SEQ ID NO: 1889 - DNA, 120 bp, synthetic construct
  source 1..120: mol_type = other DNA
aacccaaaatccaaacacaaaaacaacaatcaccaactcctacactaattccattactcttcaataacacacaatcctaaacaacacaaaactcttcccaccataaccaccaaaaattaa

SEQ ID NO: 1890 - DNA, 120 bp, synthetic construct
  source 1..120: mol_type = other DNA
ggtttgaggtttgggtgtagggataatggttgttagtttttgtgttagttttgttattttttggtggtatatggttttgggtagtgtgaggttttttttgttgtggttgttggggattgg

SEQ ID NO: 1891 - DNA, 120 bp, synthetic construct
  source 1..120: mol_type = other DNA
aacccaaaatccaaacacaaaaacaacaatcaccaactcctacactaattccattactctaaaataacacacaatcctaaacaacacaaaactcttcccaccataaccaccaaaaattaa

SEQ ID NO: 1892 - DNA, 120 bp, synthetic construct
  source 1..120: mol_type = other DNA
ggtttgaggtttgggtgtagggataatggttgttagtttttgtgttagttttgttattttaaggtggtatatggttttgggtagtgtgaggttttttttgttgtggttgttggggattgg

SEQ ID NO: 1893 - DNA, 120 bp, synthetic construct
  source 1..120: mol_type = other DNA
aacccgaaatccgaacgcaaaaacaacgatcgccaactcctacgctaattccgttactcttcgataacacacgatcctaaacaacgcgaaactcttcccgccgtaaccgccgaaaattaa

SEQ ID NO: 1894 - DNA, 120 bp, synthetic construct
  source 1..120: mol_type = other DNA
ggttcgaggttcgggcgtagggataacggtcgttagtttttgcgttagtttcgttatttttcggtggtatacggttttgggtagcgcgaggtttttttcgtcgtggtcgtcggggattgg

SEQ ID NO: 1895 - DNA, 120 bp, synthetic construct
  source 1..120: mol_type = other DNA
aacccgaaatccgaacgcaaaaacaacgatcgccaactcctacgctaattccgttactctaaaataacacacgatcctaaacaacgcgaaactcttcccgccgtaaccgccgaaaattaa

SEQ ID NO: 1896 - DNA, 120 bp, synthetic construct
  source 1..120: mol_type = other DNA
ggttcgaggttcgggcgtagggataacggtcgttagtttttgcgttagtttcgttattttaaggtggtatacggttttgggtagcgcgaggtttttttcgtcgtggtcgtcggggattgg

SEQ ID NO: 1897 - DNA, 120 bp, synthetic construct
  source 1..120: mol_type = other DNA
taccccaacaaatctaaaaaaataaaaaaacctacatcaaataatataaaaacctacatatatataaaaaacaacatcaaaaaattctcctcaaataaatttaaaaaaacattaaaaaat

SEQ ID NO: 1898 - DNA, 120 bp, synthetic construct
  source 1..120: mol_type = other DNA
tattttagtaaatttaaaggaataaaaagatttatattaaatgatgtaggggtttatatgtatgtgagaggtagtattagggggttttttttaggtgggtttaaaaaaatattaaaggat

SEQ ID NO: 1899 - DNA, 120 bp, synthetic construct
  source 1..120: mol_type = other DNA
taccccaacaaatctaaaaaaataaaaaaacctacatcaaataatataaaaacctacataattataaaaaacaacatcaaaaaattctcctcaaataaatttaaaaaaacattaaaaaat

SEQ ID NO: 1900 - DNA, 120 bp, synthetic construct
  source 1..120: mol_type = other DNA
tattttagtaaatttaaaggaataaaaagatttatattaaatgatgtaggggtttatatgattgtgagaggtagtattagggggttttttttaggtgggtttaaaaaaatattaaaggat

SEQ ID NO: 1901 - DNA, 120 bp, synthetic construct; identical to SEQ ID NO: 1897
  source 1..120: mol_type = other DNA

SEQ ID NO: 1902 - DNA, 120 bp, synthetic construct; identical to SEQ ID NO: 1898
  source 1..120: mol_type = other DNA

SEQ ID NO: 1903 - DNA, 120 bp, synthetic construct; identical to SEQ ID NO: 1899
  source 1..120: mol_type = other DNA

SEQ ID NO: 1904 - DNA, 120 bp, synthetic construct; identical to SEQ ID NO: 1900
  source 1..120: mol_type = other DNA

SEQ ID NO: 1905 - DNA, 120 bp, synthetic construct
  source 1..120: mol_type = other DNA
acaatcaaaaaaatttattacctaaaataattaaaaaatccaaaaatacatcaaaatacaaactaactttattataacaacacaataaatatcaccaaaaattcaaatactttatttctt

SEQ ID NO: 1906 - DNA, 120 bp, synthetic construct
  source 1..120: mol_type = other DNA
ataattaggagaatttattgtttagggtaattgaaaagtttagaggtgtattaagatgtaggttggttttattgtagtagtataatggatgttattaagaatttaggtattttgtttttt

SEQ ID NO: 1907 - DNA, 120 bp, synthetic construct
  source 1..120: mol_type = other DNA
acaatcaaaaaaatttattacctaaaataattaaaaaatccaaaaatacatcaaaatacattctaactttattataacaacacaataaatatcaccaaaaattcaaatactttatttctt

SEQ ID NO: 1908 - DNA, 120 bp, synthetic construct
  source 1..120: mol_type = other DNA
ataattaggagaatttattgtttagggtaattgaaaagtttagaggtgtattaagatgtattttggttttattgtagtagtataatggatgttattaagaatttaggtattttgtttttt

SEQ ID NO: 1909 - DNA, 120 bp, synthetic construct; identical to SEQ ID NO: 1905
  source 1..120: mol_type = other DNA

SEQ ID NO: 1910 - DNA, 120 bp, synthetic construct; identical to SEQ ID NO: 1906
  source 1..120: mol_type = other DNA

SEQ ID NO: 1911 - DNA, 120 bp, synthetic construct; identical to SEQ ID NO: 1907
  source 1..120: mol_type = other DNA

SEQ ID NO: 1912 - DNA, 120 bp, synthetic construct; identical to SEQ ID NO: 1908
  source 1..120: mol_type = other DNA

SEQ ID NO: 1913 - DNA, 120 bp, synthetic construct
  source 1..120: mol_type = other DNA
aattaaatatataaaaaacatattaaaaaaaaaaaaaactaaacactataccataaaaaaactataatcataatctaaacaaaaaaaacaaaaataaaaattacaaaacaaacaacaaaa

SEQ ID NO: 1914 - DNA, 120 bp, synthetic construct
  source 1..120: mol_type = other DNA
aattgaatatatagagaatatattagaagagggaaaggttaaatgttgtattgtgagaaggttgtggttatggtttagataggaggaatagaagtaggaattatagagtagatagtgaga

SEQ ID NO: 1915 - DNA, 120 bp, synthetic construct
  source 1..120: mol_type = other DNA
aattaaatatataaaaaacatattaaaaaaaaaaaaaactaaacactataccataaaaaacatataatcataatctaaacaaaaaaaacaaaaataaaaattacaaaacaaacaacaaaa

SEQ ID NO: 1916 - DNA, 120 bp, synthetic construct
  source 1..120: mol_type = other DNA
aattgaatatatagagaatatattagaagagggaaaggttaaatgttgtattgtgagaagtatgtggttatggtttagataggaggaatagaagtaggaattatagagtagatagtgaga

SEQ ID NO: 1917 - DNA, 120 bp, synthetic construct
  source 1..120: mol_type = other DNA
aattaaatatataaaaaacatattaaaaaaaaaaaaaactaaacgctataccgtaaaaaaactataatcataatctaaacaaaaaaaacaaaaataaaaattacaaaacaaacaacgaaa

SEQ ID NO: 1918 - DNA, 120 bp, synthetic construct
  source 1..120: mol_type = other DNA
aattgaatatatagagaatatattagaagagggaaaggttaaacgttgtatcgtgagaaggttgtggttatggtttagataggaggaatagaagtaggaattatagagtagatagcgaga

SEQ ID NO: 1919 - DNA, 120 bp, synthetic construct
  source 1..120: mol_type = other DNA
aattaaatatataaaaaacatattaaaaaaaaaaaaaactaaacgctataccgtaaaaaacatataatcataatctaaacaaaaaaaacaaaaataaaaattacaaaacaaacaacgaaa

SEQ ID NO: 1920 - DNA, 120 bp, synthetic construct
  source 1..120: mol_type = other DNA
aattgaatatatagagaatatattagaagagggaaaggttaaacgttgtatcgtgagaagtatgtggttatggtttagataggaggaatagaagtaggaattatagagtagatagcgaga

SEQ ID NO: 1921 - DNA, 120 bp, synthetic construct
  source 1..120: mol_type = other DNA
ctaaaatacctattaccatataaaaaaaaaataataaatattcaacaacaattaaaaatctttaccaaaacaactatcatttcaaatacaacaaaaacacaaaaataaaaaataaaaata

SEQ ID NO: 1922 - DNA, 120 bp, synthetic construct
  source 1..120: mol_type = other DNA
ttgaagtgtttgttattatataagaggaggataatgaatatttaataataattagaagtttttattagagtagttattattttaaatataataaaaatataaaagtaaaaaatgaaaatg

SEQ ID NO: 1923 - DNA, 120 bp, synthetic construct
  source 1..120: mol_type = other DNA
ctaaaatacctattaccatataaaaaaaaaataataaatattcaacaacaattaaaaatcaataccaaaacaactatcatttcaaatacaacaaaaacacaaaaataaaaaataaaaata

SEQ ID NO: 1924 - DNA, 120 bp, synthetic construct
  source 1..120: mol_type = other DNA
ttgaagtgtttgttattatataagaggaggataatgaatatttaataataattagaagttaatattagagtagttattattttaaatataataaaaatataaaagtaaaaaatgaaaatg

SEQ ID NO: 1925 - DNA, 120 bp, synthetic construct; identical to SEQ ID NO: 1921
  source 1..120: mol_type = other DNA

SEQ ID NO: 1926 - DNA, 120 bp, synthetic construct; identical to SEQ ID NO: 1922
  source 1..120: mol_type = other DNA

SEQ ID NO: 1927 - DNA, 120 bp, synthetic construct; identical to SEQ ID NO: 1923
  source 1..120: mol_type = other DNA

SEQ ID NO: 1928 - DNA, 120 bp, synthetic construct; identical to SEQ ID NO: 1924
  source 1..120: mol_type = other DNA

SEQ ID NO: 1929 - DNA, 120 bp, synthetic construct
  source 1..120: mol_type = other DNA
taaataaacacaaatatatccaaataaattaaaaaaaatatcaaatcaaaataaacacatacaaaatataatatttctctttttataaactactataaaaattatttaaaattaaacaac

SEQ ID NO: 1930 - DNA, 120 bp, synthetic construct
  source 1..120: mol_type = other DNA
taagtgggtataagtgtgtttaaataggttggaaaaaatgttaaattagagtaggtgtatataagatgtgatgtttttttttttatagattgttataaaagttgtttaaaattaaataat

SEQ ID NO: 1931 - DNA, 120 bp, synthetic construct
  source 1..120: mol_type = other DNA
taaataaacacaaatatatccaaataaattaaaaaaaatatcaaatcaaaataaacacattaaaaatataatatttctctttttataaactactataaaaattatttaaaattaaacaac

SEQ ID NO: 1932 - DNA, 120 bp, synthetic construct
  source 1..120: mol_type = other DNA
taagtgggtataagtgtgtttaaataggttggaaaaaatgttaaattagagtaggtgtattaaagatgtgatgtttttttttttatagattgttataaaagttgtttaaaattaaataat

SEQ ID NO: 1933 - DNA, 120 bp, synthetic construct
  source 1..120: mol_type = other DNA
taaataaacacaaatatatccaaataaattaaaaaaaatatcaaatcaaaataaacgcatacaaaatataatatttctctttttataaactactataaaaattatttaaaattaaacaac

SEQ ID NO: 1934 - DNA, 120 bp, synthetic construct
  source 1..120: mol_type = other DNA
taagtgggtataagtgtgtttaaataggttggaaaaaatgttaaattagagtaggcgtatataagatgtgatgtttttttttttatagattgttataaaagttgtttaaaattaaataat

SEQ ID NO: 1935 - DNA, 120 bp, synthetic construct
  source 1..120: mol_type = other DNA
taaataaacacaaatatatccaaataaattaaaaaaaatatcaaatcaaaataaacgcattaaaaatataatatttctctttttataaactactataaaaattatttaaaattaaacaac

SEQ ID NO: 1936 - DNA, 120 bp, synthetic construct
  source 1..120: mol_type = other DNA
taagtgggtataagtgtgtttaaataggttggaaaaaatgttaaattagagtaggcgtattaaagatgtgatgtttttttttttatagattgttataaaagttgtttaaaattaaataat

SEQ ID NO: 1937 - DNA, 120 bp, synthetic construct
  source 1..120: mol_type = other DNA
actaaccatataataaaaaaataatcctaaccaaaaaaaactcttaaaaaccaaaataataacatcactaaaaaccaaatatatcataaaacatattccaccataattataccataataa

SEQ ID NO: 1938 - DNA, 120 bp, synthetic construct
  source 1..120: mol_type = other DNA
attgattatgtgataagggaataattttaattaaaggaaatttttgagaattaaaatgatggtattgttaagaattaaatatgttatgaaatatattttattatgattatattgtggtaa

SEQ ID NO: 1939 - DNA, 120 bp, synthetic construct
  source 1..120: mol_type = other DNA
actaaccatataataaaaaaataatcctaaccaaaaaaaactcttaaaaaccaaaataattccatcactaaaaaccaaatatatcataaaacatattccaccataattataccataataa

SEQ ID NO: 1940 - DNA, 120 bp, synthetic construct
  source 1..120: mol_type = other DNA
attgattatgtgataagggaataattttaattaaaggaaatttttgagaattaaaatgattttattgttaagaattaaatatgttatgaaatatattttattatgattatattgtggtaa

SEQ ID NO: 1941 - DNA, 120 bp, synthetic construct
  source 1..120: mol_type = other DNA
actaaccatataataaaaaaataatcctaaccaaaaaaaactcttaaaaaccaaaataataacatcgctaaaaaccaaatatatcataaaacatattccaccataattataccgtaataa

SEQ ID NO: 1942 - DNA, 120 bp, synthetic construct
  source 1..120: mol_type = other DNA
attgattatgtgataagggaataattttaattaaaggaaatttttgagaattaaaatgatggtatcgttaagaattaaatatgttatgaaatatattttattatgattatatcgtggtaa

SEQ ID NO: 1943 - DNA, 120 bp, synthetic construct
  source 1..120: mol_type = other DNA
actaaccatataataaaaaaataatcctaaccaaaaaaaactcttaaaaaccaaaataattccatcgctaaaaaccaaatatatcataaaacatattccaccataattataccgtaataa

SEQ ID NO: 1944 - DNA, 120 bp, synthetic construct
  source 1..120: mol_type = other DNA
attgattatgtgataagggaataattttaattaaaggaaatttttgagaattaaaatgattttatcgttaagaattaaatatgttatgaaatatattttattatgattatatcgtggtaa

SEQ ID NO: 1945 - DNA, 120 bp, synthetic construct
  source 1..120: mol_type = other DNA
acttctaataacccaattctctacacaactaactcacaaatttacctaaaaaaccaaattctttactaactttacaactttaaatattccaataaaaaatataaaataatactacaaata

SEQ ID NO: 1946 - DNA, 120 bp, synthetic construct
  source 1..120: mol_type = other DNA
atttttgatagtttgattttttatatagttaatttataagtttatttgggaagttaagttttttattgattttgtagttttgaatattttagtaaaagatgtagggtagtattgtaaata

SEQ ID NO: 1947 - DNA, 120 bp, synthetic construct
  source 1..120: mol_type = other DNA
acttctaataacccaattctctacacaactaactcacaaatttacctaaaaaaccaaattaattactaactttacaactttaaatattccaataaaaaatataaaataatactacaaata

SEQ ID NO: 1948 - DNA, 120 bp, synthetic construct
  source 1..120: mol_type = other DNA
atttttgatagtttgattttttatatagttaatttataagtttatttgggaagttaagttaattattgattttgtagttttgaatattttagtaaaagatgtagggtagtattgtaaata

SEQ ID NO: 1949 - DNA, 120 bp, synthetic construct
  source 1..120: mol_type = other DNA
acttctaataacccgattctctacacaactaactcacaaatttacctaaaaaaccaaattctttactaactttacaactttaaatattccaataaaaaatataaaataatactacaaata

SEQ ID NO: 1950 - DNA, 120 bp, synthetic construct
  source 1..120: mol_type = other DNA
atttttgatagttcgattttttatatagttaatttataagtttatttgggaagttaagttttttattgattttgtagttttgaatattttagtaaaagatgtagggtagtattgtaaata

SEQ ID NO: 1951 - DNA, 120 bp, synthetic construct
  source 1..120: mol_type = other DNA
acttctaataacccgattctctacacaactaactcacaaatttacctaaaaaaccaaattaattactaactttacaactttaaatattccaataaaaaatataaaataatactacaaata

SEQ ID NO: 1952 - DNA, 120 bp, synthetic construct
  source 1..120: mol_type = other DNA
atttttgatagttcgattttttatatagttaatttataagtttatttgggaagttaagttaattattgattttgtagttttgaatattttagtaaaagatgtagggtagtattgtaaata

SEQ ID NO: 1953 - DNA, 120 bp, synthetic construct
  source 1..120: mol_type = other DNA
taaattaattctcttcttacaaaactaaaatttatttttatacacttcacccaaaatttatttactacctacatactaaacactatacttaaatttcaaaaatacaaaaaaaaataaaaa

SEQ ID NO: 1954 - DNA, 120 bp, synthetic construct
  source 1..120: mol_type = other DNA
taaattaattttttttttgtaaaattaaaatttatttttatgtattttatttaagatttgtttgttgtttatatgttaggtattgtgtttgggttttagaaatatagagggaaataaaag

SEQ ID NO: 1955 - DNA, 120 bp, synthetic construct
  source 1..120: mol_type = other DNA
taaattaattctcttcttacaaaactaaaatttatttttatacacttcacccaaaatttaaatactacctacatactaaacactatacttaaatttcaaaaatacaaaaaaaaataaaaa

SEQ ID NO: 1956 - DNA, 120 bp, synthetic construct
  source 1..120: mol_type = other DNA
taaattaattttttttttgtaaaattaaaatttatttttatgtattttatttaagatttgagtgttgtttatatgttaggtattgtgtttgggttttagaaatatagagggaaataaaag

SEQ ID NO: 1957 - DNA, 120 bp, synthetic construct; identical to SEQ ID NO: 1953
  source 1..120: mol_type = other DNA

SEQ ID NO: 1958 - DNA, 120 bp, synthetic construct; identical to SEQ ID NO: 1954
  source 1..120: mol_type = other DNA

SEQ ID NO: 1959 - DNA, 120 bp, synthetic construct; identical to SEQ ID NO: 1955
  source 1..120: mol_type = other DNA

SEQ ID NO: 1960 - DNA, 120 bp, synthetic construct; identical to SEQ ID NO: 1956
  source 1..120: mol_type = other DNA

SEQ ID NO: 1961 - DNA, 120 bp, synthetic construct
  source 1..120: mol_type = other DNA
cttttctaaacctcaacttcttactaaattatacaaaaaaaccaaaacaaaaaaccaccaaataaattctacactcaatacaacacctatttacacaccccttatactcatatttatata

SEQ ID NO: 1962 - DNA, 120 bp, synthetic construct
  source 1..120: mol_type = other DNA
tttttttaaattttaattttttgttgagttatataaaggaattaggataaagggttgttaaatgggttttgtgtttagtgtaatatttgtttgtatattttttgtatttatgtttatgta

SEQ ID NO: 1963 - DNA, 120 bp, synthetic construct
  source 1..120: mol_type = other DNA
cttttctaaacctcaacttcttactaaattatacaaaaaaaccaaaacaaaaaaccaccatctaaattctacactcaatacaacacctatttacacaccccttatactcatatttatata

SEQ ID NO: 1964 - DNA, 120 bp, synthetic construct
  source 1..120: mol_type = other DNA
tttttttaaattttaattttttgttgagttatataaaggaattaggataaagggttgttatttgggttttgtgtttagtgtaatatttgtttgtatattttttgtatttatgtttatgta

SEQ ID NO: 1965 - DNA, 120 bp, synthetic construct
  source 1..120: mol_type = other DNA
cttttctaaacctcaacttcttactaaattatacaaaaaaaccaaaacaaaaaaccgccaaataaattctacgctcaatacaacacctatttacacaccccttatactcatatttatata

SEQ ID NO: 1966 - DNA, 120 bp, synthetic construct
  source 1..120: mol_type = other DNA
tttttttaaattttaattttttgttgagttatataaaggaattaggataaagggtcgttaaatgggttttgcgtttagtgtaatatttgtttgtatattttttgtatttatgtttatgta

SEQ ID NO: 1967 - DNA, 120 bp, synthetic construct
  source 1..120: mol_type = other DNA
cttttctaaacctcaacttcttactaaattatacaaaaaaaccaaaacaaaaaaccgccatctaaattctacgctcaatacaacacctatttacacaccccttatactcatatttatata

SEQ ID NO: 1968 - DNA, 120 bp, synthetic construct
  source 1..120: mol_type = other DNA
tttttttaaattttaattttttgttgagttatataaaggaattaggataaagggtcgttatttgggttttgcgtttagtgtaatatttgtttgtatattttttgtatttatgtttatgta

SEQ ID NO: 1969 - DNA, 120 bp, synthetic construct
  source 1..120: mol_type = other DNA
atccaaactttacaactaccattccatattataaaaactactaaaataaaaccaaataatttaaacaaatttaaaccctctcacaaaaaacatccccaaattattattattttctaatct

SEQ ID NO: 1970 - DNA, 120 bp, synthetic construct
  source 1..120: mol_type = other DNA
atttaaattttataattgttattttatgttgtagaaattattaaaataaaattaggtggtttaggtaagtttagatttttttataaaaaatatttttaaattattattattttttagttt

SEQ ID NO: 1971 - DNA, 120 bp, synthetic construct
  source 1..120: mol_type = other DNA
atccaaactttacaactaccattccatattataaaaactactaaaataaaaccaactaatttaaaaaaatttaaaccctctcacaaaaaacatccccaaattattattattttctaatct

SEQ ID NO: 1972 - DNA, 120 bp, synthetic construct
  source 1..120: mol_type = other DNA
atttaaattttataattgttattttatgttgtagaaattattaaaataaaattagttggtttaggaaagtttagatttttttataaaaaatatttttaaattattattattttttagttt

SEQ ID NO: 1973 - DNA, 120 bp, synthetic construct; identical to SEQ ID NO: 1969
  source 1..120: mol_type = other DNA

SEQ ID NO: 1974 - DNA, 120 bp, synthetic construct; identical to SEQ ID NO: 1970
  source 1..120: mol_type = other DNA

SEQ ID NO: 1975 - DNA, 120 bp, synthetic construct; identical to SEQ ID NO: 1971
  source 1..120: mol_type = other DNA

SEQ ID NO: 1976 - DNA, 120 bp, synthetic construct; identical to SEQ ID NO: 1972
  source 1..120: mol_type = other DNA

SEQ ID NO: 1977 - DNA, 120 bp, synthetic construct
  source 1..120: mol_type = other DNA
aacaatcaaattaaaaaaatcaatataaattctacacaaatctaaaataaaaaacaaacataaataacactcaacttattattaaatctcaccacaataaaaaacaaacacttccctcat

SEQ ID NO: 1978 - DNA, 120 bp, synthetic construct
  source 1..120: mol_type = other DNA
ggtagttagattggagggattagtgtggattttgtatagatttggggtaggaggtaagtgtgggtaatgtttagtttattgttggattttattatagtgaaagataagtattttttttat

SEQ ID NO: 1979 - DNA, 120 bp, synthetic construct
  source 1..120: mol_type = other DNA
aacaatcaaattaaaaaaatcaatataaattctacacaaatctaaaataaaaaacaaccataaaaaacactcaacttattattaaatctcaccacaataaaaaacaaacacttccctcat

SEQ ID NO: 1980 - DNA, 120 bp, synthetic construct
  source 1..120: mol_type = other DNA
ggtagttagattggagggattagtgtggattttgtatagatttggggtaggaggtaattgtggggaatgtttagtttattgttggattttattatagtgaaagataagtattttttttat

SEQ ID NO: 1981 - DNA, 120 bp, synthetic construct
  source 1..120: mol_type = other DNA
aacaatcaaattaaaaaaatcaatataaattctacacaaatctaaaataaaaaacaaacgtaaataacgctcaacttattattaaatctcaccacaataaaaaacaaacacttccctcat

SEQ ID NO: 1982 - DNA, 120 bp, synthetic construct
  source 1..120: mol_type = other DNA
ggtagttagattggagggattagtgtggattttgtatagatttggggtaggaggtaagcgtgggtaacgtttagtttattgttggattttattatagtgaaagataagtattttttttat

SEQ ID NO: 1983 - DNA, 120 bp, synthetic construct
  source 1..120: mol_type = other DNA
aacaatcaaattaaaaaaatcaatataaattctacacaaatctaaaataaaaaacaaccgtaaaaaacgctcaacttattattaaatctcaccacaataaaaaacaaacacttccctcat

SEQ ID NO: 1984 - DNA, 120 bp, synthetic construct
  source 1..120: mol_type = other DNA
ggtagttagattggagggattagtgtggattttgtatagatttggggtaggaggtaatcgtggggaacgtttagtttattgttggattttattatagtgaaagataagtattttttttat

SEQ ID NO: 1985 - DNA, 120 bp, synthetic construct
  source 1..120: mol_type = other DNA
ataatctataactttaatttcaatatctaaaataaatattaaaaataacaatcttattctcaccatctactttatacacattcttaaaaaacttaaatatctaaaaatatacatttttta

SEQ ID NO: 1986 - DNA, 120 bp, synthetic construct
  source 1..120: mol_type = other DNA
gtaatttgtggttttggttttaatatttaggatggatgttgaaggtgataattttgtttttattgtttattttatgtatatttttgaagaatttaaatgtttaaaaatgtgtattttttg

SEQ ID NO: 1987 - DNA, 120 bp, synthetic construct
  source 1..120: mol_type = other DNA
ataatctataactttaatttcaatatctaaaataaatattaaaaataacaatcttaatctcaccttctactttatacacattcttaaaaaacttaaatatctaaaaatatacatttttta

SEQ ID NO: 1988 - DNA, 120 bp, synthetic construct
  source 1..120: mol_type = other DNA
gtaatttgtggttttggttttaatatttaggatggatgttgaaggtgataattttggttttattttttattttatgtatatttttgaagaatttaaatgtttaaaaatgtgtattttttg

SEQ ID NO: 1989 - DNA, 120 bp, synthetic construct
  source 1..120: mol_type = other DNA
ataatctataactttaatttcaatatctaaaataaatattaaaaataacaatcttattctcaccgtctactttatacacattcttaaaaaacttaaatatctaaaaatatacatttttta

SEQ ID NO: 1990 - DNA, 120 bp, synthetic construct
  source 1..120: mol_type = other DNA
gtaatttgtggttttggttttaatatttaggatggatgttgaaggtgataattttgtttttatcgtttattttatgtatatttttgaagaatttaaatgtttaaaaatgtgtattttttg

SEQ ID NO: 1991 - DNA, 120 bp, synthetic construct; identical to SEQ ID NO: 1987
  source 1..120: mol_type = other DNA

SEQ ID NO: 1992 - DNA, 120 bp, synthetic construct; identical to SEQ ID NO: 1988
  source 1..120: mol_type = other DNA

SEQ ID NO: 1993 - DNA, 120 bp, synthetic construct
  source 1..120: mol_type = other DNA
aaattaatatataataaatatacataataatattcttcaccttacaaaaattatattctaacaaaaaaataatacttaattttactaaccaaattaaatacatcacactaataccttata

SEQ ID NO: 1994 - DNA, 120 bp, synthetic construct
  source 1..120: mol_type = other DNA
aaattgatatatgatgagtatgtatggtagtattttttattttatagaaattatattttgataggaaaatagtgtttggttttgttagttagattaagtgtattatattaatattttata

SEQ ID NO: 1995 - DNA, 120 bp, synthetic construct
  source 1..120: mol_type = other DNA
aaattaatatataataaatatacataataatattcttcaccttacaaaaattatattcaaacataaaaataatacttaattttactaaccaaattaaatacatcacactaataccttata

SEQ ID NO: 1996 - DNA, 120 bp, synthetic construct
  source 1..120: mol_type = other DNA
aaattgatatatgatgagtatgtatggtagtattttttattttatagaaattatatttagatatgaaaatagtgtttggttttgttagttagattaagtgtattatattaatattttata

SEQ ID NO: 1997 - DNA, 120 bp, synthetic construct; identical to SEQ ID NO: 1993
  source 1..120: mol_type = other DNA

SEQ ID NO: 1998 - DNA, 120 bp, synthetic construct; identical to SEQ ID NO: 1994
  source 1..120: mol_type = other DNA

SEQ ID NO: 1999 - DNA, 120 bp, synthetic construct; identical to SEQ ID NO: 1995
  source 1..120: mol_type = other DNA

SEQ ID NO: 2000 - DNA, 120 bp, synthetic construct; identical to SEQ ID NO: 1996
  source 1..120: mol_type = other DNA

SEQ ID NO: 2001 - DNA, 120 bp, synthetic construct
  source 1..120: mol_type = other DNA
aactaacacttactaaaaacaaacctcctcataaaaaaattcacactcatactccaaaccttcaactatacattaaaaaccaataatacaaaatcccacaacaacaaaaaaaaaaaatac

SEQ ID NO: 2002 - DNA, 120 bp, synthetic construct
  source 1..120: mol_type = other DNA
aattaatatttgttgaaagtaggtttttttatgggagaatttatatttatgttttaaatttttagttatatattgaaaattaatggtgtagagttttatagtagtaggagaaaaggatgt

SEQ ID NO: 2003 - DNA, 120 bp, synthetic construct
  source 1..120: mol_type = other DNA
aactaacacttactaaaaacaaacctcctcataaaaaaattcacactcatactccaaaacttaaactatacattaaaaaccaataatacaaaatcccacaacaacaaaaaaaaaaaatac

SEQ ID NO: 2004 - DNA, 120 bp, synthetic construct
  source 1..120: mol_type = other DNA
aattaatatttgttgaaagtaggtttttttatgggagaatttatatttatgttttaaaatttaagttatatattgaaaattaatggtgtagagttttatagtagtaggagaaaaggatgt

SEQ ID NO: 2005 - DNA, 120 bp, synthetic construct; identical to SEQ ID NO: 2001
  source 1..120: mol_type = other DNA

SEQ ID NO: 2006 - DNA, 120 bp, synthetic construct; identical to SEQ ID NO: 2002
  source 1..120: mol_type = other DNA

SEQ ID NO: 2007 - DNA, 120 bp, synthetic construct; identical to SEQ ID NO: 2003
  source 1..120: mol_type = other DNA

SEQ ID NO: 2008 - DNA, 120 bp, synthetic construct; identical to SEQ ID NO: 2004
  source 1..120: mol_type = other DNA

SEQ ID NO: 2009 - DNA, 120 bp, synthetic construct
  source 1..120: mol_type = other DNA
aaacaaacaatcaaaaaatcacatatataaaaaaataataactctaacatattttacctactaaaaaatctaaaaaaccataacaatataatcttaaaaaattaaaaaccaaacataatc

SEQ ID NO: 2010 - DNA, 120 bp, synthetic construct
  source 1..120: mol_type = other DNA
ggataggtggttaggaaattatatgtgtgaaaaaataatagttttagtatgttttgtttattaagaaatttaaggggttatgataatatggttttaaaagattgggggttaagtatggtt

SEQ ID NO: 2011 - DNA, 120 bp, synthetic construct
  source 1..120: mol_type = other DNA
aaacaaacaatcaaaaaatcacatatataaaaaaataataactctaacatattttacctaaaaaaaaatctaaaaaaccataacaatataatcttaaaaaattaaaaaccaaacataatc

SEQ ID NO: 2012 - DNA, 120 bp, synthetic construct
  source 1..120: mol_type = other DNA
ggataggtggttaggaaattatatgtgtgaaaaaataatagttttagtatgttttgtttaagaagaaatttaaggggttatgataatatggttttaaaagattgggggttaagtatggtt

SEQ ID NO: 2013 - DNA, 120 bp, synthetic construct
  source 1..120: mol_type = other DNA
aaacaaacgatcaaaaaatcacatatataaaaaaataataactctaacatattttacctactaaaaaatctaaaaaaccataacaatataatcttaaaaaattaaaaaccaaacataatc

SEQ ID NO: 2014 - DNA, 120 bp, synthetic construct
  source 1..120: mol_type = other DNA
ggataggcggttaggaaattatatgtgtgaaaaaataatagttttagtatgttttgtttattaagaaatttaaggggttatgataatatggttttaaaagattgggggttaagtatggtt

SEQ ID NO: 2015 - DNA, 120 bp, synthetic construct
  source 1..120: mol_type = other DNA
aaacaaacgatcaaaaaatcacatatataaaaaaataataactctaacatattttacctaaaaaaaaatctaaaaaaccataacaatataatcttaaaaaattaaaaaccaaacataatc

SEQ ID NO: 2016 - DNA, 120 bp, synthetic construct
  source 1..120: mol_type = other DNA
ggataggcggttaggaaattatatgtgtgaaaaaataatagttttagtatgttttgtttaagaagaaatttaaggggttatgataatatggttttaaaagattgggggttaagtatggtt

SEQ ID NO: 2017 - DNA, 120 bp, synthetic construct
  source 1..120: mol_type = other DNA
tcatcttcactaaaaactttttaaactctataataacttcactactaacttaccccccaaaacttaaatctcaaaatctcttatctcaaaatttccacctctacattaaaaacaaaaaaa

SEQ ID NO: 2018 - DNA, 120 bp, synthetic construct
  source 1..120: mol_type = other DNA
ttatttttgttaaaaattttttaaattttatagtaattttattattaatttgttttttagggtttaagttttggaattttttattttagggtttttatttttatattaaaaatagggaga

SEQ ID NO: 2019 - DNA, 120 bp, synthetic construct
  source 1..120: mol_type = other DNA
tcatcttcactaaaaactttttaaactctataataacttcactactaacttacccccccaaaattaaatctcaaaatctcttatctcaaaatttccacctctacattaaaaacaaaaaaa

SEQ ID NO: 2020 - DNA, 120 bp, synthetic construct
  source 1..120: mol_type = other DNA
ttatttttgttaaaaattttttaaattttatagtaattttattattaatttgtttttttggggttaagttttggaattttttattttagggtttttatttttatattaaaaatagggaga

SEQ ID NO: 2021 - DNA, 120 bp, synthetic construct
  source 1..120: mol_type = other DNA
tcatcttcgctaaaaactttttaaactctataataacttcactactaacttaccccccaaaacttaaatctcgaaatctcttatctcaaaatttccacctctacattaaaaacaaaaaaa

SEQ ID NO: 2022 - DNA, 120 bp, synthetic construct
  source 1..120: mol_type = other DNA
ttattttcgttaaaaattttttaaattttatagtaattttattattaatttgttttttagggtttaagtttcggaattttttattttagggtttttatttttatattaaaaatagggaga

SEQ ID NO: 2023 - DNA, 120 bp, synthetic construct
  source 1..120: mol_type = other DNA
tcatcttcgctaaaaactttttaaactctataataacttcactactaacttacccccccgaaattaaatctcgaaatctcttatctcaaaatttccacctctacattaaaaacaaaaaaa

SEQ ID NO: 2024 - DNA, 120 bp, synthetic construct
  source 1..120: mol_type = other DNA
ttattttcgttaaaaattttttaaattttatagtaattttattattaatttgttttttcggggttaagtttcggaattttttattttagggtttttatttttatattaaaaatagggaga

SEQ ID NO: 2025 - DNA, 120 bp, synthetic construct
  source 1..120: mol_type = other DNA
aaaaaaatccttaaactcaatcttaaaaaaaaaatttaaaattcactaaacaaaaattaaaaaatttcctaaaaaataaaataaaatatacaaaaatacaaaaacaaaaaaaaacctaaa

SEQ ID NO: 2026 - DNA, 120 bp, synthetic construct
  source 1..120: mol_type = other DNA
aaaaggatttttggatttagttttgaagaaaaagtttggaatttgttaggtaaaggttgagagattttttagaagatgagatgagatgtgtaaaggtgtagaggtaagagagggtttagg

SEQ ID NO: 2027 - DNA, 120 bp, synthetic construct
  source 1..120: mol_type = other DNA
aaaaaaatccttaaactcaatcttaaaaaaaaaatttaaaattcactaaacaaaaaataaaaaaattcctaaaaaataaaataaaatatacaaaaatacaaaaacaaaaaaaaacctaaa

SEQ ID NO: 2028 - DNA, 120 bp, synthetic construct
  source 1..120: mol_type = other DNA
aaaaggatttttggatttagttttgaagaaaaagtttggaatttgttaggtaaagggtgagagagtttttagaagatgagatgagatgtgtaaaggtgtagaggtaagagagggtttagg

SEQ ID NO: 2029 - DNA, 120 bp, synthetic construct
  source 1..120: mol_type = other DNA
aaaaaaatccttaaactcaatcttaaaaaaaaaatttaaaattcgctaaacaaaaattaaaaaatttcctaaaaaataaaataaaatatacaaaaatacaaaaacaaaaaaaaacctaaa

SEQ ID NO: 2030 - DNA, 120 bp, synthetic construct
  source 1..120: mol_type = other DNA
aaaaggatttttggatttagttttgaagaaaaagtttggaattcgttaggtaaaggttgagagattttttagaagatgagatgagatgtgtaaaggtgtagaggtaagagagggtttagg

SEQ ID NO: 2031 - DNA, 120 bp, synthetic construct
  source 1..120: mol_type = other DNA
aaaaaaatccttaaactcaatcttaaaaaaaaaatttaaaattcgctaaacaaaaaataaaaaaattcctaaaaaataaaataaaatatacaaaaatacaaaaacaaaaaaaaacctaaa

SEQ ID NO: 2032 - DNA, 120 bp, synthetic construct
  source 1..120: mol_type = other DNA
aaaaggatttttggatttagttttgaagaaaaagtttggaattcgttaggtaaagggtgagagagtttttagaagatgagatgagatgtgtaaaggtgtagaggtaagagagggtttagg

SEQ ID NO: 2033 - DNA, 120 bp, synthetic construct
  source 1..120: mol_type = other DNA
tatttccttaaaatcactaataacacacaaccattactaaacaacataaacaacttatcaaaatcacaaacaaatataaaccaaattatccaatataaatatctactaatacaattaatc

SEQ ID NO: 2034 - DNA, 120 bp, synthetic construct
  source 1..120: mol_type = other DNA
tatttttttaaggttattggtgatatataattattattaagtaatatagatagtttgttaggattataggtaaatgtgagttagattgtttagtatgaatatttattgatgtaattaatt

SEQ ID NO: 2035 - DNA, 120 bp, synthetic construct
  source 1..120: mol_type = other DNA
tatttccttaaaatcactaataacacacaaccattactaaacaacataaacaacttaacaaaaacacaaacaaatataaaccaaattatccaatataaatatctactaatacaattaatc

SEQ ID NO: 2036 - DNA, 120 bp, synthetic construct
  source 1..120: mol_type = other DNA
tatttttttaaggttattggtgatatataattattattaagtaatatagatagtttggtaggagtataggtaaatgtgagttagattgtttagtatgaatatttattgatgtaattaatt

SEQ ID NO: 2037 - DNA, 120 bp, synthetic construct; identical to SEQ ID NO: 2033
  source 1..120: mol_type = other DNA

SEQ ID NO: 2038 - DNA, 120 bp, synthetic construct; identical to SEQ ID NO: 2034
  source 1..120: mol_type = other DNA

SEQ ID NO: 2039 - DNA, 120 bp, synthetic construct; identical to SEQ ID NO: 2035
  source 1..120: mol_type = other DNA

SEQ ID NO: 2040 - DNA, 120 bp, synthetic construct; identical to SEQ ID NO: 2036
  source 1..120: mol_type = other DNA

SEQ ID NO: 2041 - DNA, 120 bp, synthetic construct
  source 1..120: mol_type = other DNA
aattataataatcattaatatccctacattatcctaaatactatataaacaatactcttataatatcaatttatttttctttcctctaaattataaaaataaacctcactcacactttta

SEQ ID NO: 2042 - DNA, 120 bp, synthetic construct
  source 1..120: mol_type = other DNA
aattataataattattgatatttttatgttgttttaagtattatgtgagtaatatttttgtaatattagtttgttttttttttttttaaattatgaagataagttttatttatatttttg

SEQ ID NO: 2043 - DNA, 120 bp, synthetic construct
  source 1..120: mol_type = other DNA
aattataataatcattaatatccctacattatcctaaatactatataaacaatactctaataaaatcaatttatttttctttcctctaaattataaaaataaacctcactcacactttta

SEQ ID NO: 2044 - DNA, 120 bp, synthetic construct
  source 1..120: mol_type = other DNA
aattataataattattgatatttttatgttgttttaagtattatgtgagtaatattttggtaaaattagtttgttttttttttttttaaattatgaagataagttttatttatatttttg

SEQ ID NO: 2045 - DNA, 120 bp, synthetic construct
  source 1..120: mol_type = other DNA
aattataataatcattaatatccctacgttatcctaaatactatataaacaatactcttataatatcaatttatttttctttcctctaaattataaaaataaacctcactcacactttta

SEQ ID NO: 2046 - DNA, 120 bp, synthetic construct
  source 1..120: mol_type = other DNA
aattataataattattgatatttttacgttgttttaagtattatgtgagtaatatttttgtaatattagtttgttttttttttttttaaattatgaagataagttttatttatatttttg

SEQ ID NO: 2047 - DNA, 120 bp, synthetic construct
  source 1..120: mol_type = other DNA
aattataataatcattaatatccctacgttatcctaaatactatataaacaatactctaataaaatcaatttatttttctttcctctaaattataaaaataaacctcactcacactttta

SEQ ID NO: 2048 - DNA, 120 bp, synthetic construct
  source 1..120: mol_type = other DNA
aattataataattattgatatttttacgttgttttaagtattatgtgagtaatattttggtaaaattagtttgttttttttttttttaaattatgaagataagttttatttatatttttg

SEQ ID NO: 2049 - DNA, 120 bp, synthetic construct
  source 1..120: mol_type = other DNA
ataaataatccttactttcatttttactatccaaaaaattaaaccatctataaaaccctctacaaccaaaactctcctttttcctatatctatcacaaacacaaaataaactcttaaaaa

SEQ ID NO: 2050 - DNA, 120 bp, synthetic construct
  source 1..120: mol_type = other DNA
ataggtagtttttgtttttatttttattatttaaaaaattaaattatttataaggttttttatgattaaagttttttttttttttgtgtttattataagtataaggtgggtttttgggga

SEQ ID NO: 2051 - DNA, 120 bp, synthetic construct
  source 1..120: mol_type = other DNA
ataaataatccttactttcatttttactatccaaaaaattaaaccatctataaaacactctacaaacaaaactctcctttttcctatatctatcacaaacacaaaataaactcttaaaaa

SEQ ID NO: 2052 - DNA, 120 bp, synthetic construct
  source 1..120: mol_type = other DNA
ataggtagtttttgtttttatttttattatttaaaaaattaaattatttataaggtattttatgaataaagttttttttttttttgtgtttattataagtataaggtgggtttttgggga

SEQ ID NO: 2053 - DNA, 120 bp, synthetic construct
  source 1..120: mol_type = other DNA
ataaataatccttactttcatttttactatccaaaaaattaaaccatctataaaaccctctacgaccaaaactctcctttttcctatatctatcacaaacacaaaataaactcttaaaaa

SEQ ID NO: 2054 - DNA, 120 bp, synthetic construct
  source 1..120: mol_type = other DNA
ataggtagtttttgtttttatttttattatttaaaaaattaaattatttataaggttttttacgattaaagttttttttttttttgtgtttattataagtataaggtgggtttttgggga

SEQ ID NO: 2055 - DNA, 120 bp, synthetic construct
  source 1..120: mol_type = other DNA
ataaataatccttactttcatttttactatccaaaaaattaaaccatctataaaacactctacgaacaaaactctcctttttcctatatctatcacaaacacaaaataaactcttaaaaa

SEQ ID NO: 2056 - DNA, 120 bp, synthetic construct
  source 1..120: mol_type = other DNA
ataggtagtttttgtttttatttttattatttaaaaaattaaattatttataaggtattttacgaataaagttttttttttttttgtgtttattataagtataaggtgggtttttgggga

SEQ ID NO: 2057 - DNA, 120 bp, synthetic construct
  source 1..120: mol_type = other DNA
ttcaaacacaaaaacaaaaatttataaaccaaaaaaaaaaaactaaaacaaaaaaaccaaccaccataacaccttaacctcacctcaaacttccaacctccaaaactataaaacaacaca

SEQ ID NO: 2058 - DNA, 120 bp, synthetic construct
  source 1..120: mol_type = other DNA
tttgaatataaagatagagatttataagttaaagaaagagggttggaatagaggaattaattattgtgatgttttgattttattttagatttttagtttttagggttgtgagataatata

SEQ ID NO: 2059 - DNA, 120 bp, synthetic construct
  source 1..120: mol_type = other DNA
ttcaaacacaaaaacaaaaatttataaaccaaaaaaaaaaaactaaaacaaaaaaaacaaccaccctaacaccttaacctcacctcaaacttccaacctccaaaactataaaacaacaca

SEQ ID NO: 2060 - DNA, 120 bp, synthetic construct
  source 1..120: mol_type = other DNA
tttgaatataaagatagagatttataagttaaagaaagagggttggaatagaggaaataattattttgatgttttgattttattttagatttttagtttttagggttgtgagataatata

SEQ ID NO: 2061 - DNA, 120 bp, synthetic construct
  source 1..120: mol_type = other DNA
ttcgaacacaaaaacaaaaatttataaaccaaaaaaaaaaaactaaaacaaaaaaaccaaccaccgtaacgccttaacctcacctcaaacttccaacctccaaaactataaaacaacaca

SEQ ID NO: 2062 - DNA, 120 bp, synthetic construct
  source 1..120: mol_type = other DNA
ttcgaatataaagatagagatttataagttaaagaaagagggttggaatagaggaattaattatcgtgacgttttgattttattttagatttttagtttttagggttgtgagataatata

SEQ ID NO: 2063 - DNA, 120 bp, synthetic construct
  source 1..120: mol_type = other DNA
ttcgaacacaaaaacaaaaatttataaaccaaaaaaaaaaaactaaaacaaaaaaaacaaccaccctaacgccttaacctcacctcaaacttccaacctccaaaactataaaacaacaca

SEQ ID NO: 2064 - DNA, 120 bp, synthetic construct
  source 1..120: mol_type = other DNA
ttcgaatataaagatagagatttataagttaaagaaagagggttggaatagaggaaataattattttgacgttttgattttattttagatttttagtttttagggttgtgagataatata

SEQ ID NO: 2065 - DNA, 120 bp, synthetic construct
  source 1..120: mol_type = other DNA
ttcaaattaatcaacttatcaacaacccttatatttttacataaaatccaaataataccatactcaactacccacaaatctctacttattttccattatccacaactcaatctccaaact

SEQ ID NO: 2066 - DNA, 120 bp, synthetic construct
  source 1..120: mol_type = other DNA
tttaaattaattaatttattagtagtttttgtatttttatatgaaatttaggtagtgttatatttagttgtttataaatttttatttattttttattgtttatagtttaatttttaaatt

SEQ ID NO: 2067 - DNA, 120 bp, synthetic construct
  source 1..120: mol_type = other DNA
ttcaaattaatcaacttatcaacaacccttatatttttacataaaatccaaataatacctttctcaactacccacaaatctctacttattttccattatccacaactcaatctccaaact

SEQ ID NO: 2068 - DNA, 120 bp, synthetic construct
  source 1..120: mol_type = other DNA
tttaaattaattaatttattagtagtttttgtatttttatatgaaatttaggtagtgttttttttagttgtttataaatttttatttattttttattgtttatagtttaatttttaaatt

SEQ ID NO: 2069 - DNA, 120 bp, synthetic construct; identical to SEQ ID NO: 2065
  source 1..120: mol_type = other DNA

SEQ ID NO: 2070 - DNA, 120 bp, synthetic construct; identical to SEQ ID NO: 2066
  source 1..120: mol_type = other DNA

SEQ ID NO: 2071 - DNA, 120 bp, synthetic construct; identical to SEQ ID NO: 2067
  source 1..120: mol_type = other DNA

SEQ ID NO: 2072 - DNA, 120 bp, synthetic construct; identical to SEQ ID NO: 2068
  source 1..120: mol_type = other DNA

SEQ ID NO: 2073 - DNA, 120 bp, synthetic construct
  source 1..120: mol_type = other DNA
ataaaatatccatcttactctaccctcaaactataacttaaatctaattttcaaaccttattactcaacataaattacaccattaaaattttataaatatccaactaacaataatataca

SEQ ID NO: 2074 - DNA, 120 bp, synthetic construct
  source 1..120: mol_type = other DNA
atgagatatttattttgttttatttttaggttgtgatttagatttggtttttaggttttattatttagtatgaattatattattaaggttttgtgggtgtttagttagtaatgatgtgta

SEQ ID NO: 2075 - DNA, 120 bp, synthetic construct
  source 1..120: mol_type = other DNA
ataaaatatccatcttactctaccctcaaactataacttaaatctaattttcaaaccttctaactcaacataaattacaccattaaaattttataaatatccaactaacaataatataca

SEQ ID NO: 2076 - DNA, 120 bp, synthetic construct
  source 1..120: mol_type = other DNA
atgagatatttattttgttttatttttaggttgtgatttagatttggtttttaggttttttgatttagtatgaattatattattaaggttttgtgggtgtttagttagtaatgatgtgta

SEQ ID NO: 2077 - DNA, 120 bp, synthetic construct; identical to SEQ ID NO: 2073
  source 1..120: mol_type = other DNA

SEQ ID NO: 2078 - DNA, 120 bp, synthetic construct; identical to SEQ ID NO: 2074
  source 1..120: mol_type = other DNA

SEQ ID NO: 2079 - DNA, 120 bp, synthetic construct; identical to SEQ ID NO: 2075
  source 1..120: mol_type = other DNA

SEQ ID NO: 2080 - DNA, 120 bp, synthetic construct; identical to SEQ ID NO: 2076
  source 1..120: mol_type = other DNA

SEQ ID NO: 2081 - DNA, 120 bp, synthetic construct
  source 1..120: mol_type = other DNA
cttataaaactctattaaaaattacacaacaaaaattctacctacctttaccttacaattactataaaaataaattcaaaataattcccaaattcaacatataactcccacttctactac

SEQ ID NO: 2082 - DNA, 120 bp, synthetic construct
  source 1..120: mol_type = other DNA
tttatggagttttgttgagggttatatagtaaggattttgtttgtttttattttgtaattgttatgagaataaatttaaaatggtttttgagtttagtatgtgatttttatttttgttgt

SEQ ID NO: 2083 - DNA, 120 bp, synthetic construct
  source 1..120: mol_type = other DNA
cttataaaactctattaaaaattacacaacaaaaattctacctacctttaccttacaataaatataaaaataaattcaaaataattcccaaattcaacatataactcccacttctactac

SEQ ID NO: 2084 - DNA, 120 bp, synthetic construct
  source 1..120: mol_type = other DNA
tttatggagttttgttgagggttatatagtaaggattttgtttgtttttattttgtaatagatatgagaataaatttaaaatggtttttgagtttagtatgtgatttttatttttgttgt

SEQ ID NO: 2085 - DNA, 120 bp, synthetic construct
  source 1..120: mol_type = other DNA
cttataaaactctattaaaaattacacaacaaaaattctacctacctttaccttacaattactataaaaataaattcaaaataattcccgaattcaacatataactcccacttctactac

SEQ ID NO: 2086 - DNA, 120 bp, synthetic construct
  source 1..120: mol_type = other DNA
tttatggagttttgttgagggttatatagtaaggattttgtttgtttttattttgtaattgttatgagaataaatttaaaatggttttcgagtttagtatgtgatttttatttttgttgt

SEQ ID NO: 2087 - DNA, 120 bp, synthetic construct
  source 1..120: mol_type = other DNA
cttataaaactctattaaaaattacacaacaaaaattctacctacctttaccttacaataaatataaaaataaattcaaaataattcccgaattcaacatataactcccacttctactac

SEQ ID NO: 2088 - DNA, 120 bp, synthetic construct
  source 1..120: mol_type = other DNA
tttatggagttttgttgagggttatatagtaaggattttgtttgtttttattttgtaatagatatgagaataaatttaaaatggttttcgagtttagtatgtgatttttatttttgttgt

SEQ ID NO: 2089 - DNA, 120 bp, synthetic construct
  source 1..120: mol_type = other DNA
ttaaatcatactatttcaaaacttaaattatatacactcataactccaaaatttacatcataatacttatcaccattattataatataaatatctatacaattatttattaaatatttct

SEQ ID NO: 2090 - DNA, 120 bp, synthetic construct
  source 1..120: mol_type = other DNA
ttgaattatattgttttaggatttgaattgtatatatttatgattttagagtttgtattatgatatttattattattattatggtgtaggtatttgtatagttatttgttaaatgttttt

SEQ ID NO: 2091 - DNA, 120 bp, synthetic construct
  source 1..120: mol_type = other DNA
ttaaatcatactatttcaaaacttaaattatatacactcataactccaaaatttacttcataataattatcaccattattataatataaatatctatacaattatttattaaatatttct

SEQ ID NO: 2092 - DNA, 120 bp, synthetic construct
  source 1..120: mol_type = other DNA
ttgaattatattgttttaggatttgaattgtatatatttatgattttagagtttgttttatgatagttattattattattatggtgtaggtatttgtatagttatttgttaaatgttttt

SEQ ID NO: 2093 - DNA, 120 bp, synthetic construct; identical to SEQ ID NO: 2089
  source 1..120: mol_type = other DNA

SEQ ID NO: 2094 - DNA, 120 bp, synthetic construct; identical to SEQ ID NO: 2090
  source 1..120: mol_type = other DNA

SEQ ID NO: 2095 - DNA, 120 bp, synthetic construct; identical to SEQ ID NO: 2091
  source 1..120: mol_type = other DNA

SEQ ID NO: 2096 - DNA, 120 bp, synthetic construct; identical to SEQ ID NO: 2092
  source 1..120: mol_type = other DNA

SEQ ID NO: 2097 - DNA, 120 bp, synthetic construct
  source 1..120: mol_type = other DNA
aattaaacatacttttattattctttttacaatcaatattatatttctaaaaaatactcataacaaatacaactactattctttcattttcactaccataaaccattcaaattaaaaaat

SEQ ID NO: 2098 - DNA, 120 bp, synthetic construct
  source 1..120: mol_type = other DNA
aattaggtatgtttttattattttttttataattaatattatgtttttaagaggtatttatagtagatgtagttattatttttttatttttattgttgtaaattatttgggttagagaat

SEQ ID NO: 2099 - DNA, 120 bp, synthetic construct
  source 1..120: mol_type = other DNA
aattaaacatacttttattattctttttacaatcaatattatatttctaaaaaatactaataaaaaatacaactactattctttcattttcactaccataaaccattcaaattaaaaaat

SEQ ID NO: 2100 - DNA, 120 bp, synthetic construct
  source 1..120: mol_type = other DNA
aattaggtatgtttttattattttttttataattaatattatgtttttaagaggtattaataggagatgtagttattatttttttatttttattgttgtaaattatttgggttagagaat

SEQ ID NO: 2101 - DNA, 120 bp, synthetic construct
  source 1..120: mol_type = other DNA
aattaaacatacttttattattctttttacaatcaatattatatttctaaaaaatactcataacaaatacaactactattctttcattttcactaccgtaaaccattcgaattaaaaaat

SEQ ID NO: 2102 - DNA, 120 bp, synthetic construct
  source 1..120: mol_type = other DNA
aattaggtatgtttttattattttttttataattaatattatgtttttaagaggtatttatagtagatgtagttattatttttttatttttattgtcgtaaattattcgggttagagaat

SEQ ID NO: 2103 - DNA, 120 bp, synthetic construct
  source 1..120: mol_type = other DNA
aattaaacatacttttattattctttttacaatcaatattatatttctaaaaaatactaataaaaaatacaactactattctttcattttcactaccgtaaaccattcgaattaaaaaat

SEQ ID NO: 2104 - DNA, 120 bp, synthetic construct
  source 1..120: mol_type = other DNA
aattaggtatgtttttattattttttttataattaatattatgtttttaagaggtattaataggagatgtagttattatttttttatttttattgtcgtaaattattcgggttagagaat

SEQ ID NO: 2105 - DNA, 120 bp, synthetic construct
  source 1..120: mol_type = other DNA
tatacctttataaaatcaatcccttcttaccactaataatcacttccaacataaatatattctccccttataattttaccttttccaatatcatatacataaaaatcatatttatattta

SEQ ID NO: 2106 - DNA, 120 bp, synthetic construct
  source 1..120: mol_type = other DNA
tgtgtttttatgaagttaatttttttttattattagtagttatttttaatatggatgtattttttttttataattttgttttttttaatattatatatatagagattatatttatattta

SEQ ID NO: 2107 - DNA, 120 bp, synthetic construct
  source 1..120: mol_type = other DNA
tatacctttataaaatcaatcccttcttaccactaataatcacttccaacataaatattttctacccttataattttaccttttccaatatcatatacataaaaatcatatttatattta

SEQ ID NO: 2108 - DNA, 120 bp, synthetic construct
  source 1..120: mol_type = other DNA
tgtgtttttatgaagttaatttttttttattattagtagttatttttaatatggatgttttttgtttttataattttgttttttttaatattatatatatagagattatatttatattta

SEQ ID NO: 2109 - DNA, 120 bp, synthetic construct; identical to SEQ ID NO: 2105
  source 1..120: mol_type = other DNA

SEQ ID NO: 2110 - DNA, 120 bp, synthetic construct; identical to SEQ ID NO: 2106
  source 1..120: mol_type = other DNA

SEQ ID NO: 2111 - DNA, 120 bp, synthetic construct; identical to SEQ ID NO: 2107
  source 1..120: mol_type = other DNA

SEQ ID NO: 2112 - DNA, 120 bp, synthetic construct; identical to SEQ ID NO: 2108
  source 1..120: mol_type = other DNA

SEQ ID NO: 2113 - DNA, 120 bp, synthetic construct
  source 1..120: mol_type = other DNA
aacttcattataattctaataataaaaacttccctaaaaacaaaaatacaaatttctttccataaaaccttatattatcaaccctcattcttaattctaaataatattttaaactataaa

SEQ ID NO: 2114 - DNA, 120 bp, synthetic construct
  source 1..120: mol_type = other DNA
agttttattgtaattttgatgataaaagtttttttggaaataaaagtgtaggtttttttttatggagttttatgttattagtttttatttttaattttgaatggtattttaagttgtaag

SEQ ID NO: 2115 - DNA, 120 bp, synthetic construct
  source 1..120: mol_type = other DNA
aacttcattataattctaataataaaaacttccctaaaaacaaaaatacaaatttctttacctaaaaccttatattatcaaccctcattcttaattctaaataatattttaaactataaa

SEQ ID NO: 2116 - DNA, 120 bp, synthetic construct
  source 1..120: mol_type = other DNA
agttttattgtaattttgatgataaaagtttttttggaaataaaagtgtaggtttttttatttggagttttatgttattagtttttatttttaattttgaatggtattttaagttgtaag

SEQ ID NO: 2117 - DNA, 120 bp, synthetic construct; identical to SEQ ID NO: 2113
  source 1..120: mol_type = other DNA

SEQ ID NO: 2118 - DNA, 120 bp, synthetic construct; identical to SEQ ID NO: 2114
  source 1..120: mol_type = other DNA

SEQ ID NO: 2119 - DNA, 120 bp, synthetic construct; identical to SEQ ID NO: 2115
  source 1..120: mol_type = other DNA

SEQ ID NO: 2120 - DNA, 120 bp, synthetic construct; identical to SEQ ID NO: 2116
  source 1..120: mol_type = other DNA

SEQ ID NO: 2121 - DNA, 120 bp, synthetic construct
  source 1..120: mol_type = other DNA
cacccccccaatcctcccacctacaaaaaaaaaaataaaaaccaaaaaccctaaacacaaccaaaaaatcttatcctaacaacttcctcctaaaacaataaactaacactaaataatcta

SEQ ID NO: 2122 - DNA, 120 bp, synthetic construct
  source 1..120: mol_type = other DNA
tatttttttaatttttttatttataaagagaaaaataagaattagaggttttaggtatggttgggaggttttgttttgatagtttttttttggaataatgagttgatattggatagtttg

SEQ ID NO: 2123 - DNA, 120 bp, synthetic construct
  source 1..120: mol_type = other DNA
cacccccccaatcctcccacctacaaaaaaaaaaataaaaaccaaaaaccctaaacacaccaaaaaaatcttatcctaacaacttcctcctaaaacaataaactaacactaaataatcta

SEQ ID NO: 2124 - DNA, 120 bp, synthetic construct
  source 1..120: mol_type = other DNA
tatttttttaatttttttatttataaagagaaaaataagaattagaggttttaggtatgttggggaggttttgttttgatagtttttttttggaataatgagttgatattggatagtttg

SEQ ID NO: 2125 - DNA, 120 bp, synthetic construct
  source 1..120: mol_type = other DNA
cacccccccaatcctcccacctacaaaaaaaaaaataaaaaccaaaaaccctaaacacgaccgaaaaatcttatcctaacaacttcctcctaaaacaataaactaacactaaataatcta

SEQ ID NO: 2126 - DNA, 120 bp, synthetic construct
  source 1..120: mol_type = other DNA
tatttttttaatttttttatttataaagagaaaaataagaattagaggttttaggtacggtcgggaggttttgttttgatagtttttttttggaataatgagttgatattggatagtttg

SEQ ID NO: 2127 - DNA, 120 bp, synthetic construct
  source 1..120: mol_type = other DNA
cacccccccaatcctcccacctacaaaaaaaaaaataaaaaccaaaaaccctaaacacgccgaaaaaatcttatcctaacaacttcctcctaaaacaataaactaacactaaataatcta

SEQ ID NO: 2128 - DNA, 120 bp, synthetic construct
  source 1..120: mol_type = other DNA
tatttttttaatttttttatttataaagagaaaaataagaattagaggttttaggtacgtcggggaggttttgttttgatagtttttttttggaataatgagttgatattggatagtttg

SEQ ID NO: 2129 - DNA, 120 bp, synthetic construct
  source 1..120: mol_type = other DNA
atctatcactttccattaaatttacaactttactaaactccaaaattccaccccactataccatctcacttaaaatccaatatccaaacaaaaatcaaaaaatcacactttttaaatctc

SEQ ID NO: 2130 - DNA, 120 bp, synthetic construct
  source 1..120: mol_type = other DNA
atttgttattttttattagatttgtaattttgttaaattttggagttttattttgttgtattattttatttaaaatttagtatttaaataagaattagaaaattatattttttaaatttt

SEQ ID NO: 2131 - DNA, 120 bp, synthetic construct
  source 1..120: mol_type = other DNA
atctatcactttccattaaatttacaactttactaaactccaaaattccaccccacaataccatatcacttaaaatccaatatccaaacaaaaatcaaaaaatcacactttttaaatctc

SEQ ID NO: 2132 - DNA, 120 bp, synthetic construct
  source 1..120: mol_type = other DNA
atttgttattttttattagatttgtaattttgttaaattttggagttttattttgtagtattatgttatttaaaatttagtatttaaataagaattagaaaattatattttttaaatttt

SEQ ID NO: 2133 - DNA, 120 bp, synthetic construct
  source 1..120: mol_type = other DNA
atctatcactttccattaaatttacaactttactaaactccgaaattccaccccgctataccatctcacttaaaatccaatatccaaacaaaaatcaaaaaatcacactttttaaatctc

SEQ ID NO: 2134 - DNA, 120 bp, synthetic construct
  source 1..120: mol_type = other DNA
atttgttattttttattagatttgtaattttgttaaatttcggagttttatttcgttgtattattttatttaaaatttagtatttaaataagaattagaaaattatattttttaaatttt

SEQ ID NO: 2135 - DNA, 120 bp, synthetic construct
  source 1..120: mol_type = other DNA
atctatcactttccattaaatttacaactttactaaactccgaaattccaccccgcaataccatatcacttaaaatccaatatccaaacaaaaatcaaaaaatcacactttttaaatctc

SEQ ID NO: 2136 - DNA, 120 bp, synthetic construct
  source 1..120: mol_type = other DNA
atttgttattttttattagatttgtaattttgttaaatttcggagttttatttcgtagtattatgttatttaaaatttagtatttaaataagaattagaaaattatattttttaaatttt

SEQ ID NO: 2137 - DNA, 120 bp, synthetic construct
  source 1..120: mol_type = other DNA
ataaaaattaaaaaaataaaatatttaaaaacactttaatacatttttctaaacaaaacaaaattaaattttaaaaaaaatatcttaaattaaaaataataataaaaataataaatcatt

SEQ ID NO: 2138 - DNA, 120 bp, synthetic construct
  source 1..120: mol_type = other DNA
gtgagaattaaaggaatagaatatttgaaaatattttggtatatttttttaggtagaatagaattgagttttggggagggtgttttgagttaaagatggtgatgaaaataatgagttatt

SEQ ID NO: 2139 - DNA, 120 bp, synthetic construct
  source 1..120: mol_type = other DNA
ataaaaattaaaaaaataaaatatttaaaaacactttaatacatttttctaaacaaaaaaaatttaaattttaaaaaaaatatcttaaattaaaaataataataaaaataataaatcatt

SEQ ID NO: 2140 - DNA, 120 bp, synthetic construct
  source 1..120: mol_type = other DNA
gtgagaattaaaggaatagaatatttgaaaatattttggtatatttttttaggtagaagagatttgagttttggggagggtgttttgagttaaagatggtgatgaaaataatgagttatt

SEQ ID NO: 2141 - DNA, 120 bp, synthetic construct; identical to SEQ ID NO: 2137
  source 1..120: mol_type = other DNA

SEQ ID NO: 2142 - DNA, 120 bp, synthetic construct; identical to SEQ ID NO: 2138
  source 1..120: mol_type = other DNA

SEQ ID NO: 2143 - DNA, 120 bp, synthetic construct; identical to SEQ ID NO: 2139
  source 1..120: mol_type = other DNA

SEQ ID NO: 2144 - DNA, 120 bp, synthetic construct; identical to SEQ ID NO: 2140
  source 1..120: mol_type = other DNA

SEQ ID NO: 2145 - DNA, 120 bp, synthetic construct
  source 1..120: mol_type = other DNA
ttaaccccttcatcataaccccattttattaaaaaaataatccaattattactttaaaatccaaacctcccattaacacttcaacctactaaaatttaatatttactccctcactcaaat

SEQ ID NO: 2146 - DNA, 120 bp, synthetic construct
  source 1..120: mol_type = other DNA
ttagtttttttattgtagttttattttgttgaaagaatagtttaattattgttttaaagtttaaattttttattgatattttagtttattaaaatttgatgtttatttttttatttaaat

SEQ ID NO: 2147 - DNA, 120 bp, synthetic construct
  source 1..120: mol_type = other DNA
ttaaccccttcatcataaccccattttattaaaaaaataatccaattattactttaaactcctaacctcccattaacacttcaacctactaaaatttaatatttactccctcactcaaat

SEQ ID NO: 2148 - DNA, 120 bp, synthetic construct
  source 1..120: mol_type = other DNA
ttagtttttttattgtagttttattttgttgaaagaatagtttaattattgttttaaatttttaattttttattgatattttagtttattaaaatttgatgtttatttttttatttaaat

SEQ ID NO: 2149 - DNA, 120 bp, synthetic construct
  source 1..120: mol_type = other DNA
ttaaccccttcatcgtaaccccattttattaaaaaaataatccaattattactttaaaatccaaacctcccattaacacttcaacctactaaaatttaatatttactccctcactcaaat

SEQ ID NO: 2150 - DNA, 120 bp, synthetic construct
  source 1..120: mol_type = other DNA
ttagtttttttatcgtagttttattttgttgaaagaatagtttaattattgttttaaagtttaaattttttattgatattttagtttattaaaatttgatgtttatttttttatttaaat

SEQ ID NO: 2151 - DNA, 120 bp, synthetic construct
  source 1..120: mol_type = other DNA
ttaaccccttcatcgtaaccccattttattaaaaaaataatccaattattactttaaactcctaacctcccattaacacttcaacctactaaaatttaatatttactccctcactcaaat

SEQ ID NO: 2152 - DNA, 120 bp, synthetic construct
  source 1..120: mol_type = other DNA
ttagtttttttatcgtagttttattttgttgaaagaatagtttaattattgttttaaatttttaattttttattgatattttagtttattaaaatttgatgtttatttttttatttaaat

SEQ ID NO: 2153 - DNA, 120 bp, synthetic construct
  source 1..120: mol_type = other DNA
tcacttccaatatcctccttctacctaacaacaccacataactcctattcacttactcataacatcaaacttctactcccttcatcaaaaccaactaaccaaaaaataaaacaacaccta

SEQ ID NO: 2154 - DNA, 120 bp, synthetic construct
  source 1..120: mol_type = other DNA
ttatttttagtgttttttttttatttggtagtgttatgtggtttttatttatttgtttgtagtgttagatttttgttttttttattaagattagttggttaggaagtaaggtaatatttg

SEQ ID NO: 2155 - DNA, 120 bp, synthetic construct
  source 1..120: mol_type = other DNA
tcacttccaatatcctccttctacctaacaacaccacataactcctattcacttactcctaaaatcaaacttctactcccttcatcaaaaccaactaaccaaaaaataaaacaacaccta

SEQ ID NO: 2156 - DNA, 120 bp, synthetic construct
  source 1..120: mol_type = other DNA
ttatttttagtgttttttttttatttggtagtgttatgtggtttttatttatttgtttttagagttagatttttgttttttttattaagattagttggttaggaagtaaggtaatatttg

SEQ ID NO: 2157 - DNA, 120 bp, synthetic construct
  source 1..120: mol_type = other DNA
tcacttccaatatcctccttctacctaacaacgccacgtaactcctattcacttactcgtaacgtcaaacttctactcccttcatcaaaaccaactaaccaaaaaataaaacaacaccta

SEQ ID NO: 2158 - DNA, 120 bp, synthetic construct
  source 1..120: mol_type = other DNA
ttatttttagtgttttttttttatttggtagcgttacgtggtttttatttatttgttcgtagcgttagatttttgttttttttattaagattagttggttaggaagtaaggtaatatttg

SEQ ID NO: 2159 - DNA, 120 bp, synthetic construct
  source 1..120: mol_type = other DNA
tcacttccaatatcctccttctacctaacaacgccacgtaactcctattcacttactcctaaaatcaaacttctactcccttcatcaaaaccaactaaccaaaaaataaaacaacaccta

SEQ ID NO: 2160 - DNA, 120 bp, synthetic construct
  source 1..120: mol_type = other DNA
ttatttttagtgttttttttttatttggtagcgttacgtggtttttatttatttgtttttagagttagatttttgttttttttattaagattagttggttaggaagtaaggtaatatttg

SEQ ID NO: 2161 - DNA, 120 bp, synthetic construct
  source 1..120: mol_type = other DNA
cctataaatttccttctcaaatcctctataaacacaatcatcttcctcataaactacaaaatctaactaccttaaaacatatactaaaaatctcctatatactatacattatactaaact

SEQ ID NO: 2162 - DNA, 120 bp, synthetic construct
  source 1..120: mol_type = other DNA
tttgtggattttttttttaggttttttgtaggtataattattttttttatagattataaagtttgattattttggaatatgtgttgagaattttttgtgtattatgtattgtgttaggtt

SEQ ID NO: 2163 - DNA, 120 bp, synthetic construct
  source 1..120: mol_type = other DNA
cctataaatttccttctcaaatcctctataaacacaatcatcttcctcataaactacacaatataactaccttaaaacatatactaaaaatctcctatatactatacattatactaaact

SEQ ID NO: 2164 - DNA, 120 bp, synthetic construct
  source 1..120: mol_type = other DNA
tttgtggattttttttttaggttttttgtaggtataattattttttttatagattatatagtatgattattttggaatatgtgttgagaattttttgtgtattatgtattgtgttaggtt

SEQ ID NO: 2165 - DNA, 120 bp, synthetic construct; identical to SEQ ID NO: 2161
  source 1..120: mol_type = other DNA

SEQ ID NO: 2166 - DNA, 120 bp, synthetic construct; identical to SEQ ID NO: 2162
  source 1..120: mol_type = other DNA

SEQ ID NO: 2167 - DNA, 120 bp, synthetic construct; identical to SEQ ID NO: 2163
  source 1..120: mol_type = other DNA

SEQ ID NO: 2168 - DNA, 120 bp, synthetic construct; identical to SEQ ID NO: 2164
  source 1..120: mol_type = other DNA

SEQ ID NO: 2169 - DNA, 120 bp, synthetic construct
  source 1..120: mol_type = other DNA
ataccacaacatctatcaaacacattcacctaaaaaacaacaaaaaacaactataactatttcttcaacccataactatttctcttatcatcttctaaataaatatatctaacaataaat

SEQ ID NO: 2170 - DNA, 120 bp, synthetic construct
  source 1..120: mol_type = other DNA
gtattataatatttgttagatatatttatttggaagatgataagaaatagttatggttgtttttttagtttatggttgttttttttgttattttttaggtgagtgtatttggtagtggat

SEQ ID NO: 2171 - DNA, 120 bp, synthetic construct
  source 1..120: mol_type = other DNA
ataccacaacatctatcaaacacattcacctaaaaaacaacaaaaaacaactataactaattattcaacccataactatttctcttatcatcttctaaataaatatatctaacaataaat

SEQ ID NO: 2172 - DNA, 120 bp, synthetic construct
  source 1..120: mol_type = other DNA
gtattataatatttgttagatatatttatttggaagatgataagaaatagttatggttgattatttagtttatggttgttttttttgttattttttaggtgagtgtatttggtagtggat

SEQ ID NO: 2173 - DNA, 120 bp, synthetic construct
  source 1..120: mol_type = other DNA
ataccacaacatctatcaaacacattcacctaaaaaacgacaaaaaacaactataactatttcttcaacccataactatttctcttatcatcttctaaataaatatatctaacaataaat

SEQ ID NO: 2174 - DNA, 120 bp, synthetic construct
  source 1..120: mol_type = other DNA
gtattataatatttgttagatatatttatttggaagacgataagaaatagttatggttgtttttttagtttatggttgttttttttgttattttttaggtgagtgtatttggtagtggat

SEQ ID NO: 2175 - DNA, 120 bp, synthetic construct
  source 1..120: mol_type = other DNA
ataccacaacatctatcaaacacattcacctaaaaaacgacaaaaaacaactataactaattattcaacccataactatttctcttatcatcttctaaataaatatatctaacaataaat

SEQ ID NO: 2176 - DNA, 120 bp, synthetic construct
  source 1..120: mol_type = other DNA
gtattataatatttgttagatatatttatttggaagacgataagaaatagttatggttgattatttagtttatggttgttttttttgttattttttaggtgagtgtatttggtagtggat

SEQ ID NO: 2177 - DNA, 120 bp, synthetic construct
  source 1..120: mol_type = other DNA
ctaaactatacttaaaaaaaccaaaaaatactcaccttttcatattaatacctaatatacaaactaacacataataaataaacaacaactatttttaaataactaaaaaattaaattaat

SEQ ID NO: 2178 - DNA, 120 bp, synthetic construct
  source 1..120: mol_type = other DNA
ttagattgtgtttagggagattagagaatatttatttttttatattggtgtttggtatatagattggtatatagtgggtgagtaatagttatttttaagtaattaaaagattaaattagt

SEQ ID NO: 2179 - DNA, 120 bp, synthetic construct
  source 1..120: mol_type = other DNA
ctaaactatacttaaaaaaaccaaaaaatactcaccttttcatattaatacctaatataaaacctaacacataataaataaacaacaactatttttaaataactaaaaaattaaattaat

SEQ ID NO: 2180 - DNA, 120 bp, synthetic construct
  source 1..120: mol_type = other DNA
ttagattgtgtttagggagattagagaatatttatttttttatattggtgtttggtatagagtttggtatatagtgggtgagtaatagttatttttaagtaattaaaagattaaattagt

SEQ ID NO: 2181 - DNA, 120 bp, synthetic construct; identical to SEQ ID NO: 2177
  source 1..120: mol_type = other DNA

SEQ ID NO: 2182 - DNA, 120 bp, synthetic construct; identical to SEQ ID NO: 2178
  source 1..120: mol_type = other DNA

SEQ ID NO: 2183 - DNA, 120 bp, synthetic construct; identical to SEQ ID NO: 2179
  source 1..120: mol_type = other DNA

SEQ ID NO: 2184 - DNA, 120 bp, synthetic construct; identical to SEQ ID NO: 2180
  source 1..120: mol_type = other DNA

SEQ ID NO: 2185 - DNA, 120 bp, synthetic construct
  source 1..120: mol_type = other DNA
actatatataattttaataaaaattaaattacataatatatataaaaaatctaaaacaatacctaaaatatactaaactttccataaatattaactattaataattattattattaccat

SEQ ID NO: 2186 - DNA, 120 bp, synthetic construct
  source 1..120: mol_type = other DNA
attgtatgtggttttggtgaaaattaaattatataatgtatgtaaaaaatttagaataatgtttgagatatattagattttttataagtattaattattggtaattattattgttgttat

SEQ ID NO: 2187 - DNA, 120 bp, synthetic construct
  source 1..120: mol_type = other DNA
actatatataattttaataaaaattaaattacataatatatataaaaaatctaaaacaaaacataaaatatactaaactttccataaatattaactattaataattattattattaccat

SEQ ID NO: 2188 - DNA, 120 bp, synthetic construct
  source 1..120: mol_type = other DNA
attgtatgtggttttggtgaaaattaaattatataatgtatgtaaaaaatttagaataaagtgtgagatatattagattttttataagtattaattattggtaattattattgttgttat

SEQ ID NO: 2189 - DNA, 120 bp, synthetic construct; identical to SEQ ID NO: 2185
  source 1..120: mol_type = other DNA

SEQ ID NO: 2190 - DNA, 120 bp, synthetic construct; identical to SEQ ID NO: 2186
  source 1..120: mol_type = other DNA

SEQ ID NO: 2191 - DNA, 120 bp, synthetic construct
  source 1..120: mol_type = other DNA
actatatataattttaataaaaattaaattacataatatatataaaaaatctaaaacaaaacgtaaaatatactaaactttccataaatattaactattaataattattattattaccat

SEQ ID NO: 2192 - DNA, 120 bp, synthetic construct
  source 1..120: mol_type = other DNA
attgtatgtggttttggtgaaaattaaattatataatgtatgtaaaaaatttagaataaagcgtgagatatattagattttttataagtattaattattggtaattattattgttgttat

SEQ ID NO: 2193 - DNA, 120 bp, synthetic construct
  source 1..120: mol_type = other DNA
aaccttccaattcatacaccaatttaactacaaaaaaaaaccttctcccaatcccacacacaactaccttcttcaaaccataaaccttccttactatataccctatactaaataaaaact

SEQ ID NO: 2194 - DNA, 120 bp, synthetic construct
  source 1..120: mol_type = other DNA
ggttttttaatttatgtattagtttaattgtgggagaaagtttttttttagttttgtatgtaattgttttttttaaattatgggttttttttgttgtatattttatattggatagaggtt

SEQ ID NO: 2195 - DNA, 120 bp, synthetic construct
  source 1..120: mol_type = other DNA
aaccttccaattcatacaccaatttaactacaaaaaaaaaccttctcccaatcccacacccacctaccttcttcaaaccataaaccttccttactatataccctatactaaataaaaact

SEQ ID NO: 2196 - DNA, 120 bp, synthetic construct
  source 1..120: mol_type = other DNA
ggttttttaatttatgtattagtttaattgtgggagaaagtttttttttagttttgtatttatttgttttttttaaattatgggttttttttgttgtatattttatattggatagaggtt

SEQ ID NO: 2197 - DNA, 120 bp, synthetic construct
  source 1..120: mol_type = other DNA
aaccttccaattcatacaccaatttaactacgaaaaaaaaccttctcccaatcccgcacgcaactaccttcttcaaaccataaaccttccttactatataccctatactaaataaaaact

SEQ ID NO: 2198 - DNA, 120 bp, synthetic construct
  source 1..120: mol_type = other DNA
ggttttttaatttatgtattagtttaattgcgggagaaagtttttttttagtttcgtacgtaattgttttttttaaattatgggttttttttgttgtatattttatattggatagaggtt

SEQ ID NO: 2199 - DNA, 120 bp, synthetic construct
  source 1..120: mol_type = other DNA
aaccttccaattcatacaccaatttaactacgaaaaaaaaccttctcccaatcccgcacccacctaccttcttcaaaccataaaccttccttactatataccctatactaaataaaaact

SEQ ID NO: 2200 - DNA, 120 bp, synthetic construct
  source 1..120: mol_type = other DNA
ggttttttaatttatgtattagtttaattgcgggagaaagtttttttttagtttcgtatttatttgttttttttaaattatgggttttttttgttgtatattttatattggatagaggtt

SEQ ID NO: 2201 - DNA, 120 bp, synthetic construct
  source 1..120: mol_type = other DNA
tacttcttatttaaaactaaatatacactactatatccacacaccaccccattatctatatatccactaataaatacttaaattacttccctaacacaactatttctataaacaatccca

SEQ ID NO: 2202 - DNA, 120 bp, synthetic construct
  source 1..120: mol_type = other DNA
tgttttttgtttaaagttggatatatgttgttgtgtttatatattattttattatttgtgtgtttgttggtggatatttaggttgtttttttggtatggttgtttttgtgaatgatttta

SEQ ID NO: 2203 - DNA, 120 bp, synthetic construct
  source 1..120: mol_type = other DNA
tacttcttatttaaaactaaatatacactactatatccacacaccaccccattatcaatatatcccctaataaatacttaaattacttccctaacacaactatttctataaacaatccca

SEQ ID NO: 2204 - DNA, 120 bp, synthetic construct
  source 1..120: mol_type = other DNA
tgttttttgtttaaagttggatatatgttgttgtgtttatatattattttattattagtgtgttttttggtggatatttaggttgtttttttggtatggttgtttttgtgaatgatttta

SEQ ID NO: 2205 - DNA, 120 bp, synthetic construct
  source 1..120: mol_type = other DNA
tacttcttatttaaaactaaatatacgctactatatccacacaccaccccattatctatatatccgctaataaatacttaaattacttccctaacacgactatttctataaacgatccca

SEQ ID NO: 2206 - DNA, 120 bp, synthetic construct
  source 1..120: mol_type = other DNA
tgttttttgtttaaagttggatatacgttgttgtgtttatatattattttattatttgtgtgttcgttggtggatatttaggttgtttttttggtacggttgtttttgtgaacgatttta

SEQ ID NO: 2207 - DNA, 120 bp, synthetic construct
  source 1..120: mol_type = other DNA
tacttcttatttaaaactaaatatacgctactatatccacacaccaccccattatcaatatatcccctaataaatacttaaattacttccctaacacgactatttctataaacgatccca

SEQ ID NO: 2208 - DNA, 120 bp, synthetic construct
  source 1..120: mol_type = other DNA
tgttttttgtttaaagttggatatacgttgttgtgtttatatattattttattattagtgtgttttttggtggatatttaggttgtttttttggtacggttgtttttgtgaacgatttta

SEQ ID NO: 2209 - DNA, 120 bp, synthetic construct
  source 1..120: mol_type = other DNA
ttaaatctattcaaaatttaaatatatacatttttataaatacaaaactccaaaaacatacacactcaataacaacaaaaacaaaaaaaaaaaactacaacaataaaaaatatcaaaaaa

SEQ ID NO: 2210 - DNA, 120 bp, synthetic construct
  source 1..120: mol_type = other DNA
ttaggtttgtttaagatttgaatatatatatttttataaatgtaaaattttaagggtatatgtatttagtagtagtgaggataggggaaaaaaattgtaatagtggaagatgttagagaa

SEQ ID NO: 2211 - DNA, 120 bp, synthetic construct
  source 1..120: mol_type = other DNA
ttaaatctattcaaaatttaaatatatacatttttataaatacaaaactccaaaaaaatacacacacaataacaacaaaaacaaaaaaaaaaaactacaacaataaaaaatatcaaaaaa

SEQ ID NO: 2212 - DNA, 120 bp, synthetic construct
  source 1..120: mol_type = other DNA
ttaggtttgtttaagatttgaatatatatatttttataaatgtaaaattttaaggggatatgtatgtagtagtagtgaggataggggaaaaaaattgtaatagtggaagatgttagagaa

SEQ ID NO: 2213 - DNA, 120 bp, synthetic construct
  source 1..120: mol_type = other DNA
ttaaatctattcaaaatttaaatatatacatttttataaatacaaaactccaaaaacatacgcactcaataacaacgaaaacaaaaaaaaaaaactacaacaataaaaaatatcaaaaaa

SEQ ID NO: 2214 - DNA, 120 bp, synthetic construct
  source 1..120: mol_type = other DNA
ttaggtttgtttaagatttgaatatatatatttttataaatgtaaaattttaagggtatacgtatttagtagtagcgaggataggggaaaaaaattgtaatagtggaagatgttagagaa

SEQ ID NO: 2215 - DNA, 120 bp, synthetic construct
  source 1..120: mol_type = other DNA
ttaaatctattcaaaatttaaatatatacatttttataaatacaaaactccaaaaaaatacgcacgcaataacaacgaaaacaaaaaaaaaaaactacaacaataaaaaatatcaaaaaa

SEQ ID NO: 2216 - DNA, 120 bp, synthetic construct
  source 1..120: mol_type = other DNA
ttaggtttgtttaagatttgaatatatatatttttataaatgtaaaattttaaggggatacgtacgtagtagtagcgaggataggggaaaaaaattgtaatagtggaagatgttagagaa

SEQ ID NO: 2217 - DNA, 120 bp, synthetic construct
  source 1..120: mol_type = other DNA
acaacacctttaaaaataactaacatttcaactaacaaacacaaaaaattaaacaaacattcaaaataaaaaaaaaaacaaatacaaaaaccatcatacattttcaacaaataaaatata

SEQ ID NO: 2218 - DNA, 120 bp, synthetic construct
  source 1..120: mol_type = other DNA
gtagtatttttaaaaatagttaatattttaattggtaggtataaaaagttgagtgagtatttaaagtagagggaagagtaggtgtaaagattattatgtatttttagtaaatgaggtatg

SEQ ID NO: 2219 - DNA, 120 bp, synthetic construct
  source 1..120: mol_type = other DNA
acaacacctttaaaaataactaacatttcaactaacaaacacaaaaaattaaacaaacaatctaaataaaaaaaaaaacaaatacaaaaaccatcatacattttcaacaaataaaatata

SEQ ID NO: 2220 - DNA, 120 bp, synthetic construct
  source 1..120: mol_type = other DNA
gtagtatttttaaaaatagttaatattttaattggtaggtataaaaagttgagtgagtaatttaagtagagggaagagtaggtgtaaagattattatgtatttttagtaaatgaggtatg

SEQ ID NO: 2221 - DNA, 120 bp, synthetic construct
  source 1..120: mol_type = other DNA
acaacacctttaaaaataactaacatttcaactaacaaacacaaaaaattaaacgaacattcaaaataaaaaaaaaaacaaatacaaaaaccatcatacattttcaacaaataaaatata

SEQ ID NO: 2222 - DNA, 120 bp, synthetic construct
  source 1..120: mol_type = other DNA
gtagtatttttaaaaatagttaatattttaattggtaggtataaaaagttgagcgagtatttaaagtagagggaagagtaggtgtaaagattattatgtatttttagtaaatgaggtatg

SEQ ID NO: 2223 - DNA, 120 bp, synthetic construct
  source 1..120: mol_type = other DNA
acaacacctttaaaaataactaacatttcaactaacaaacacaaaaaattaaacgaacaatctaaataaaaaaaaaaacaaatacaaaaaccatcatacattttcaacaaataaaatata

SEQ ID NO: 2224 - DNA, 120 bp, synthetic construct
  source 1..120: mol_type = other DNA
gtagtatttttaaaaatagttaatattttaattggtaggtataaaaagttgagcgagtaatttaagtagagggaagagtaggtgtaaagattattatgtatttttagtaaatgaggtatg

SEQ ID NO: 2225 - DNA, 120 bp, synthetic construct
  source 1..120: mol_type = other DNA
tattaaatataaatcaaaaccctataattaaaaatcaaaactaaaaatatcaataaattaattcattacacaccattaatattaaaaaaaaatatataattatacaaataaataatcaaa

SEQ ID NO: 2226 - DNA, 120 bp, synthetic construct
  source 1..120: mol_type = other DNA
tgttaaatgtaagttaaaattttgtagttaaaaattaaaattgaaaatattaatagattggtttattatatattattaatattaaagaaagatatgtaattatgtaagtggatgattaga

SEQ ID NO: 2227 - DNA, 120 bp, synthetic construct
  source 1..120: mol_type = other DNA
tattaaatataaatcaaaaccctataattaaaaatcaaaactaaaaatatcaataaataaattaattacacaccattaatattaaaaaaaaatatataattatacaaataaataatcaaa

SEQ ID NO: 2228 - DNA, 120 bp, synthetic construct
  source 1..120: mol_type = other DNA
tgttaaatgtaagttaaaattttgtagttaaaaattaaaattgaaaatattaatagatgggttaattatatattattaatattaaagaaagatatgtaattatgtaagtggatgattaga

SEQ ID NO: 2229 - DNA, 120 bp, synthetic construct; identical to SEQ ID NO: 2225
  source 1..120: mol_type = other DNA

SEQ ID NO: 2230 - DNA, 120 bp, synthetic construct; identical to SEQ ID NO: 2226
  source 1..120: mol_type = other DNA

SEQ ID NO: 2231 - DNA, 120 bp, synthetic construct; identical to SEQ ID NO: 2227
  source 1..120: mol_type = other DNA

SEQ ID NO: 2232 - DNA, 120 bp, synthetic construct; identical to SEQ ID NO: 2228
  source 1..120: mol_type = other DNA

SEQ ID NO: 2233 - DNA, 120 bp, synthetic construct
  source 1..120: mol_type = other DNA
aaacaaaacccaactaaaataaaacatacattctaataattcaatttattatattctacataaaacctatctttacaaaactacctctccccccaattaaaaaacaattttaccaatcaa

SEQ ID NO: 2234 - DNA, 120 bp, synthetic construct
  source 1..120: mol_type = other DNA
aaatagaatttaattggggtaaaatatatattttggtagtttaatttgttatgttttgtatagggtttgtttttatagaattatttttttttttagttaaggaataattttgttaattag

SEQ ID NO: 2235 - DNA, 120 bp, synthetic construct
  source 1..120: mol_type = other DNA
aaacaaaacccaactaaaataaaacatacattctaataattcaatttattatattctaaataatacctatctttacaaaactacctctccccccaattaaaaaacaattttaccaatcaa

SEQ ID NO: 2236 - DNA, 120 bp, synthetic construct
  source 1..120: mol_type = other DNA
aaatagaatttaattggggtaaaatatatattttggtagtttaatttgttatgttttggatagtgtttgtttttatagaattatttttttttttagttaaggaataattttgttaattag

SEQ ID NO: 2237 - DNA, 120 bp, synthetic construct; identical to SEQ ID NO: 2233
  source 1..120: mol_type = other DNA

SEQ ID NO: 2238 - DNA, 120 bp, synthetic construct; identical to SEQ ID NO: 2234
  source 1..120: mol_type = other DNA

SEQ ID NO: 2239 - DNA, 120 bp, synthetic construct; identical to SEQ ID NO: 2235
  source 1..120: mol_type = other DNA

SEQ ID NO: 2240 - DNA, 120 bp, synthetic construct; identical to SEQ ID NO: 2236
  source 1..120: mol_type = other DNA

SEQ ID NO: 2241 - DNA, 120 bp, synthetic construct
  source 1..120: mol_type = other DNA
cctaaaaactatcccattacaaaaaacaaaacaatctcatatacccccaaaacatacaaacactaaaaataaacaacactaaaaaaacaaatttcaactaaaattaataaatacttccaa

SEQ ID NO: 2242 - DNA, 120 bp, synthetic construct
  source 1..120: mol_type = other DNA
tttgggggttgttttattgtaaggggtagaataattttgtgtgtttttagggtgtatgagtattggagatgggtaatattggaaagatagattttagttgaaattagtaagtatttttaa

SEQ ID NO: 2243 - DNA, 120 bp, synthetic construct
  source 1..120: mol_type = other DNA
cctaaaaactatcccattacaaaaaacaaaacaatctcatatacccccaaaacatacaaaacctaaaaataaacaacactaaaaaaacaaatttcaactaaaattaataaatacttccaa

SEQ ID NO: 2244 - DNA, 120 bp, synthetic construct
  source 1..120: mol_type = other DNA
tttgggggttgttttattgtaaggggtagaataattttgtgtgtttttagggtgtatgagatttggagatgggtaatattggaaagatagattttagttgaaattagtaagtatttttaa

SEQ ID NO: 2245 - DNA, 120 bp, synthetic construct
  source 1..120: mol_type = other DNA
cctaaaaactatcccattacaaaaaacaaaacaatctcgtatacccccaaaacgtacgaacactaaaaataaacaacactaaaaaaacaaatttcaactaaaattaataaatacttccaa

SEQ ID NO: 2246 - DNA, 120 bp, synthetic construct
  source 1..120: mol_type = other DNA
tttgggggttgttttattgtaaggggtagaataatttcgtgtgtttttagggcgtacgagtattggagatgggtaatattggaaagatagattttagttgaaattagtaagtatttttaa

SEQ ID NO: 2247 - DNA, 120 bp, synthetic construct
  source 1..120: mol_type = other DNA
cctaaaaactatcccattacaaaaaacaaaacaatctcgtatacccccaaaacgtacgaaacctaaaaataaacaacactaaaaaaacaaatttcaactaaaattaataaatacttccaa

SEQ ID NO: 2248 - DNA, 120 bp, synthetic construct
  source 1..120: mol_type = other DNA
tttgggggttgttttattgtaaggggtagaataatttcgtgtgtttttagggcgtacgagatttggagatgggtaatattggaaagatagattttagttgaaattagtaagtatttttaa

SEQ ID NO: 2249 - DNA, 120 bp, synthetic construct
  source 1..120: mol_type = other DNA
taaaaaattctaacataccattattctaatttcattatctacaactaaacaatactttaaacactcaatattaatttaaaaattcctaataaaatttaaaaaataaatatataatactat

SEQ ID NO: 2250 - DNA, 120 bp, synthetic construct
  source 1..120: mol_type = other DNA
tggaggattttaatatattattattttgattttattatttatagttgagtagtgttttgagtatttagtattaatttggaagtttttaataggatttaagaaatagatatgtagtgttgt

SEQ ID NO: 2251 - DNA, 120 bp, synthetic construct
  source 1..120: mol_type = other DNA
taaaaaattctaacataccattattctaatttcattatctacaactaaacaatactttaacaactcaatattaatttaaaaattcctaataaaatttaaaaaataaatatataatactat

SEQ ID NO: 2252 - DNA, 120 bp, synthetic construct
  source 1..120: mol_type = other DNA
tggaggattttaatatattattattttgattttattatttatagttgagtagtgttttgataatttagtattaatttggaagtttttaataggatttaagaaatagatatgtagtgttgt

SEQ ID NO: 2253 - DNA, 120 bp, synthetic construct; identical to SEQ ID NO: 2249
  source 1..120: mol_type = other DNA

SEQ ID NO: 2254 - DNA, 120 bp, synthetic construct; identical to SEQ ID NO: 2250
  source 1..120: mol_type = other DNA

SEQ ID NO: 2255 - DNA, 120 bp, synthetic construct; identical to SEQ ID NO: 2251
  source 1..120: mol_type = other DNA

SEQ ID NO: 2256 - DNA, 120 bp, synthetic construct; identical to SEQ ID NO: 2252
  source 1..120: mol_type = other DNA

SEQ ID NO: 2257 - DNA, 120 bp, synthetic construct
  source 1..120: mol_type = other DNA
aaatacaccctaactctaccaaacaaacaacatcccttaaacctacactactcttattaaaccaaaaaacaatctattactttaaattctaaaaacctcccatacaacctaataaaaatc

SEQ ID NO: 2258 - DNA, 120 bp, synthetic construct
  source 1..120: mol_type = other DNA
ggatgtattttggttttgttaggtaggtggtattttttagatttatattgtttttgttgagttagggagtggtttgttgttttgaattttaaagattttttgtatagtttaataagaatt

SEQ ID NO: 2259 - DNA, 120 bp, synthetic construct
  source 1..120: mol_type = other DNA
aaatacaccctaactctaccaaacaaacaacatcccttaaacctacactactcttattaatacaaaaaacaatctattactttaaattctaaaaacctcccatacaacctaataaaaatc

SEQ ID NO: 2260 - DNA, 120 bp, synthetic construct
  source 1..120: mol_type = other DNA
ggatgtattttggttttgttaggtaggtggtattttttagatttatattgtttttgttgatatagggagtggtttgttgttttgaattttaaagattttttgtatagtttaataagaatt

SEQ ID NO: 2261 - DNA, 120 bp, synthetic construct
  source 1..120: mol_type = other DNA
aaatacaccctaactctaccaaacaaacgacatcccttaaacctacactactcttattaaaccaaaaaacgatctattactttaaattctaaaaacctcccgtacaacctaataaaaatc

SEQ ID NO: 2262 - DNA, 120 bp, synthetic construct
  source 1..120: mol_type = other DNA
ggatgtattttggttttgttaggtaggcggtattttttagatttatattgtttttgttgagttagggagcggtttgttgttttgaattttaaagatttttcgtatagtttaataagaatt

SEQ ID NO: 2263 - DNA, 120 bp, synthetic construct
  source 1..120: mol_type = other DNA
aaatacaccctaactctaccaaacaaacgacatcccttaaacctacactactcttattaatacaaaaaacgatctattactttaaattctaaaaacctcccgtacaacctaataaaaatc

SEQ ID NO: 2264 - DNA, 120 bp, synthetic construct
  source 1..120: mol_type = other DNA
ggatgtattttggttttgttaggtaggcggtattttttagatttatattgtttttgttgatatagggagcggtttgttgttttgaattttaaagatttttcgtatagtttaataagaatt

SEQ ID NO: 2265 - DNA, 120 bp, synthetic construct
  source 1..120: mol_type = other DNA
cccaaaaaatatcctaaaaaccaataaaccaaaaaatatccaaaaactaaataaccatctaaataatcaaaaactccaataacaaaaaaataccccccatcaccaacaatactaataccc

SEQ ID NO: 2266 - DNA, 120 bp, synthetic construct
  source 1..120: mol_type = other DNA
tttagaagatgttttgaaagttagtgagttaggagatatttagaagttaaatggttatttgagtggttaagggttttagtgatgaagaaatgttttttattattaatagtgttggtgttt

SEQ ID NO: 2267 - DNA, 120 bp, synthetic construct
  source 1..120: mol_type = other DNA
cccaaaaaatatcctaaaaaccaataaaccaaaaaatatccaaaaactaaataaccatctccataatcaaaaactccaataacaaaaaaataccccccatcaccaacaatactaataccc

SEQ ID NO: 2268 - DNA, 120 bp, synthetic construct
  source 1..120: mol_type = other DNA
tttagaagatgttttgaaagttagtgagttaggagatatttagaagttaaatggttatttttgtggttaagggttttagtgatgaagaaatgttttttattattaatagtgttggtgttt

SEQ ID NO: 2269 - DNA, 120 bp, synthetic construct
  source 1..120: mol_type = other DNA
cccaaaaaatatcctaaaaaccaataaaccaaaaaatatccaaaaactaaataaccatctaaataatcaaaaactccaataacgaaaaaataccccccatcaccaacaatactaataccc

SEQ ID NO: 2270 - DNA, 120 bp, synthetic construct
  source 1..120: mol_type = other DNA
tttagaagatgttttgaaagttagtgagttaggagatatttagaagttaaatggttatttgagtggttaagggttttagtgacgaagaaatgttttttattattaatagtgttggtgttt

SEQ ID NO: 2271 - DNA, 120 bp, synthetic construct
  source 1..120: mol_type = other DNA
cccaaaaaatatcctaaaaaccaataaaccaaaaaatatccaaaaactaaataaccatctccgtaatcaaaaactccaataacgaaaaaataccccccatcaccaacaatactaataccc

SEQ ID NO: 2272 - DNA, 120 bp, synthetic construct
  source 1..120: mol_type = other DNA
tttagaagatgttttgaaagttagtgagttaggagatatttagaagttaaatggttattttcgtggttaagggttttagtgacgaagaaatgttttttattattaatagtgttggtgttt

SEQ ID NO: 2273 - DNA, 120 bp, synthetic construct
  source 1..120: mol_type = other DNA
aaaccacaaaaaatatacttattttaaaaaattactttcaaatataactcatctaaaaaataccattccttaattactatctttctttccaatcaaaaaaaccctaaaacccctttttat

SEQ ID NO: 2274 - DNA, 120 bp, synthetic construct
  source 1..120: mol_type = other DNA
agattataagaagtatatttattttgagaagttgtttttaagtatagtttatttaagggatattattttttagttattatttttttttttggttaagaaggttttggagtttttttttat

SEQ ID NO: 2275 - DNA, 120 bp, synthetic construct
  source 1..120: mol_type = other DNA
aaaccacaaaaaatatacttattttaaaaaattactttcaaatataactcatctaaaaaaatccattccttaattactatctttctttccaatcaaaaaaaccctaaaacccctttttat

SEQ ID NO: 2276 - DNA, 120 bp, synthetic construct
  source 1..120: mol_type = other DNA
agattataagaagtatatttattttgagaagttgtttttaagtatagtttatttaagggagtttattttttagttattatttttttttttggttaagaaggttttggagtttttttttat

SEQ ID NO: 2277 - DNA, 120 bp, synthetic construct
  source 1..120: mol_type = other DNA
aaaccacaaaaaatatacttattttaaaaaattactttcaaatataactcatctaaaaaataccattccttaattactatctttctttccgatcaaaaaaaccctaaaacccctttttat

SEQ ID NO: 2278 - DNA, 120 bp, synthetic construct
  source 1..120: mol_type = other DNA
agattataagaagtatatttattttgagaagttgtttttaagtatagtttatttaagggatattattttttagttattattttttttttcggttaagaaggttttggagtttttttttat

SEQ ID NO: 2279 - DNA, 120 bp, synthetic construct
  source 1..120: mol_type = other DNA
aaaccacaaaaaatatacttattttaaaaaattactttcaaatataactcatctaaaaaaatccattccttaattactatctttctttccgatcaaaaaaaccctaaaacccctttttat

SEQ ID NO: 2280 - DNA, 120 bp, synthetic construct
  source 1..120: mol_type = other DNA
agattataagaagtatatttattttgagaagttgtttttaagtatagtttatttaagggagtttattttttagttattattttttttttcggttaagaaggttttggagtttttttttat

SEQ ID NO: 2281 - DNA, 120 bp, synthetic construct
  source 1..120: mol_type = other DNA
aattaaaattaaaaaaaaataaaattaaatactaataaaaaaaattaaatcaaaaatactaaatactattttctattaaatatatttccattaccaacaaaaaaaataaatcaatttaat

SEQ ID NO: 2282 - DNA, 120 bp, synthetic construct
  source 1..120: mol_type = other DNA
aattgaagttaaaaaaaagtaaagttgaatattgatgggaaaagttagattaggaatgttggatattattttttgttgagtatgtttttattgttagtagggagaataaattagtttagt

SEQ ID NO: 2283 - DNA, 120 bp, synthetic construct
  source 1..120: mol_type = other DNA
aattaaaattaaaaaaaaataaaattaaatactaataaaaaaaattaaatcaaaaatactctatactattttctattaaatatatttccattaccaacaaaaaaaataaatcaatttaat

SEQ ID NO: 2284 - DNA, 120 bp, synthetic construct
  source 1..120: mol_type = other DNA
aattgaagttaaaaaaaagtaaagttgaatattgatgggaaaagttagattaggaatgttttatattattttttgttgagtatgtttttattgttagtagggagaataaattagtttagt

SEQ ID NO: 2285 - DNA, 120 bp, synthetic construct; identical to SEQ ID NO: 2281
  source 1..120: mol_type = other DNA

SEQ ID NO: 2286 - DNA, 120 bp, synthetic construct; identical to SEQ ID NO: 2282
  source 1..120: mol_type = other DNA

SEQ ID NO: 2287 - DNA, 120 bp, synthetic construct; identical to SEQ ID NO: 2283
  source 1..120: mol_type = other DNA

SEQ ID NO: 2288 - DNA, 120 bp, synthetic construct; identical to SEQ ID NO: 2284
  source 1..120: mol_type = other DNA

SEQ ID NO: 2289 - DNA, 120 bp, synthetic construct
  source 1..120: mol_type = other DNA
tttttatacaatatacttttatttcaatataaaaaccatacaatccaaataaaaaaaaacaaatcttataaaaaaaactaaataatttaataaaacataataataaaaaaaactatattc

SEQ ID NO: 2290 - DNA, 120 bp, synthetic construct
  source 1..120: mol_type = other DNA
tttttgtataatatatttttattttaatgtgagaattatgtagtttaaatgaaaagaggtaggttttatgggagagattgagtagtttaataaaatatagtaataggaggagttgtattt

SEQ ID NO: 2291 - DNA, 120 bp, synthetic construct
  source 1..120: mol_type = other DNA
tttttatacaatatacttttatttcaatataaaaaccatacaatccaaataaaaaaaaacccatcttataaaaaaaactaaataatttaataaaacataataataaaaaaaactatattc

SEQ ID NO: 2292 - DNA, 120 bp, synthetic construct
  source 1..120: mol_type = other DNA
tttttgtataatatatttttattttaatgtgagaattatgtagtttaaatgaaaagaggtttgttttatgggagagattgagtagtttaataaaatatagtaataggaggagttgtattt

SEQ ID NO: 2293 - DNA, 120 bp, synthetic construct; identical to SEQ ID NO: 2289
  source 1..120: mol_type = other DNA

SEQ ID NO: 2294 - DNA, 120 bp, synthetic construct; identical to SEQ ID NO: 2290
  source 1..120: mol_type = other DNA

SEQ ID NO: 2295 - DNA, 120 bp, synthetic construct
  source 1..120: mol_type = other DNA
tttttatacaatatacttttatttcaatataaaaaccatacaatccaaataaaaaaaaacccgtcttataaaaaaaactaaataatttaataaaacataataataaaaaaaactatattc

SEQ ID NO: 2296 - DNA, 120 bp, synthetic construct
  source 1..120: mol_type = other DNA
tttttgtataatatatttttattttaatgtgagaattatgtagtttaaatgaaaagaggttcgttttatgggagagattgagtagtttaataaaatatagtaataggaggagttgtattt

SEQ ID NO: 2297 - DNA, 120 bp, synthetic construct
  source 1..120: mol_type = other DNA
ttaatacaaccataaaaaaaacactataatacaacattaaaaataaaaaataatataaaaacaaactaccaaacccattctaaaacaaaataaaaaaaaatacaattccaccattaaata

SEQ ID NO: 2298 - DNA, 120 bp, synthetic construct
  source 1..120: mol_type = other DNA
ttggtgtggttataaaaaaaatattataatatagtattggaaatgggaaataatataagggtagattgttaagtttattttgaggtgggatggagagggatgtaattttattgttagata

SEQ ID NO: 2299 - DNA, 120 bp, synthetic construct
  source 1..120: mol_type = other DNA
ttaatacaaccataaaaaaaacactataatacaacattaaaaataaaaaataatataaaacaaaactaccaaacccattctaaaacaaaataaaaaaaaatacaattccaccattaaata

SEQ ID NO: 2300 - DNA, 120 bp, synthetic construct
  source 1..120: mol_type = other DNA
ttggtgtggttataaaaaaaatattataatatagtattggaaatgggaaataatataaggtaagattgttaagtttattttgaggtgggatggagagggatgtaattttattgttagata

SEQ ID NO: 2301 - DNA, 120 bp, synthetic construct
  source 1..120: mol_type = other DNA
ttaatacgaccataaaaaaaacactataatacaacattaaaaataaaaaataatataaaaacaaactaccaaacccattctaaaacgaaataaaaaaaaatacaattccaccgttaaata

SEQ ID NO: 2302 - DNA, 120 bp, synthetic construct
  source 1..120: mol_type = other DNA
ttggtgcggttataaaaaaaatattataatatagtattggaaatgggaaataatataagggtagattgttaagtttattttgaggcgggatggagagggatgtaattttatcgttagata

SEQ ID NO: 2303 - DNA, 120 bp, synthetic construct
  source 1..120: mol_type = other DNA
ttaatacgaccataaaaaaaacactataatacaacattaaaaataaaaaataatataaaacaaaactaccaaacccattctaaaacgaaataaaaaaaaatacaattccaccgttaaata

SEQ ID NO: 2304 - DNA, 120 bp, synthetic construct
  source 1..120: mol_type = other DNA
ttggtgcggttataaaaaaaatattataatatagtattggaaatgggaaataatataaggtaagattgttaagtttattttgaggcgggatggagagggatgtaattttatcgttagata

SEQ ID NO: 2305 - DNA, 120 bp, synthetic construct
  source 1..120: mol_type = other DNA
aacctctaatctataataaaaaaaaataattctatcttacaaaaaatacaaaaaattaaaatcaaatatacataaaaaaatttttctatataatattataaataataaacatttaccaac

SEQ ID NO: 2306 - DNA, 120 bp, synthetic construct
  source 1..120: mol_type = other DNA
aatttttaatttgtagtaaaaggaagtaattttattttgtaggaggtgtaagggattgaaattgagtgtgtataagggaatttttttgtgtgatgttgtgggtggtggatatttgttagt

SEQ ID NO: 2307 - DNA, 120 bp, synthetic construct
  source 1..120: mol_type = other DNA
aacctctaatctataataaaaaaaaataattctatcttacaaaaaatacaaaaaattaaatacaaatatacataaaaaaatttttctatataatattataaataataaacatttaccaac

SEQ ID NO: 2308 - DNA, 120 bp, synthetic construct
  source 1..120: mol_type = other DNA
aatttttaatttgtagtaaaaggaagtaattttattttgtaggaggtgtaagggattgaatatgagtgtgtataagggaatttttttgtgtgatgttgtgggtggtggatatttgttagt

SEQ ID NO: 2309 - DNA, 120 bp, synthetic construct
  source 1..120: mol_type = other DNA
aacctctaatctataataaaaaaaaataattctatcttacaaaaaatacaaaaaattaaaatcgaatatacataaaaaaatttttctatataatattataaataataaacatttaccaac

SEQ ID NO: 2310 - DNA, 120 bp, synthetic construct
  source 1..120: mol_type = other DNA
aatttttaatttgtagtaaaaggaagtaattttattttgtaggaggtgtaagggattgaaatcgagtgtgtataagggaatttttttgtgtgatgttgtgggtggtggatatttgttagt

SEQ ID NO: 2311 - DNA, 120 bp, synthetic construct
  source 1..120: mol_type = other DNA
aacctctaatctataataaaaaaaaataattctatcttacaaaaaatacaaaaaattaaatacgaatatacataaaaaaatttttctatataatattataaataataaacatttaccaac

SEQ ID NO: 2312 - DNA, 120 bp, synthetic construct
  source 1..120: mol_type = other DNA
aatttttaatttgtagtaaaaggaagtaattttattttgtaggaggtgtaagggattgaatacgagtgtgtataagggaatttttttgtgtgatgttgtgggtggtggatatttgttagt

SEQ ID NO: 2313 - DNA, 120 bp, synthetic construct
  source 1..120: mol_type = other DNA
ataactaaatatttccttactaaatacatatataaacattaaactaaaatacaaaatcttccctacaaaaacaaaaaaaaattataaatattcatataatcacacttacttttcttatta

SEQ ID NO: 2314 - DNA, 120 bp, synthetic construct
  source 1..120: mol_type = other DNA
gtaattaaatatttttttgttgaatatatatataaatattgaattgaaatatagagttttttttataaggataaggaaaaattgtaaatatttgtatagttatatttattttttttgtta

SEQ ID NO: 2315 - DNA, 120 bp, synthetic construct
  source 1..120: mol_type = other DNA
ataactaaatatttccttactaaatacatatataaacattaaactaaaatacaaaatcttaactacaaaaacaaaaaaaaattataaatattcatataatcacacttacttttcttatta

SEQ ID NO: 2316 - DNA, 120 bp, synthetic construct
  source 1..120: mol_type = other DNA
gtaattaaatatttttttgttgaatatatatataaatattgaattgaaatatagagttttagttataaggataaggaaaaattgtaaatatttgtatagttatatttattttttttgtta

SEQ ID NO: 2317 - DNA, 120 bp, synthetic construct
  source 1..120: mol_type = other DNA
ataactaaatatttccttactaaatacatatataaacattaaactaaaatacaaaatcttccctacaaaaacaaaaaaaaattataaatattcgtataatcacacttacttttcttatta

SEQ ID NO: 2318 - DNA, 120 bp, synthetic construct
  source 1..120: mol_type = other DNA
gtaattaaatatttttttgttgaatatatatataaatattgaattgaaatatagagttttttttataaggataaggaaaaattgtaaatattcgtatagttatatttattttttttgtta

SEQ ID NO: 2319 - DNA, 120 bp, synthetic construct
  source 1..120: mol_type = other DNA
ataactaaatatttccttactaaatacatatataaacattaaactaaaatacaaaatcttaactacaaaaacaaaaaaaaattataaatattcgtataatcacacttacttttcttatta

SEQ ID NO: 2320 - DNA, 120 bp, synthetic construct
  source 1..120: mol_type = other DNA
gtaattaaatatttttttgttgaatatatatataaatattgaattgaaatatagagttttagttataaggataaggaaaaattgtaaatattcgtatagttatatttattttttttgtta

SEQ ID NO: 2321 - DNA, 120 bp, synthetic construct
  source 1..120: mol_type = other DNA
taaaatatattcctaaaaattaatttctactttattaaaactctataaaaaaaattctactaatccctatacaataattaaaacacctactccctcacaaaaaaaataaacataacacaa

SEQ ID NO: 2322 - DNA, 120 bp, synthetic construct
  source 1..120: mol_type = other DNA
tgagatgtgtttttagaagttgatttttgttttattagagttttataagggaaattttgttgatttttgtatagtgattaagatatttgtttttttatagaaagaataaatatagtatag

SEQ ID NO: 2323 - DNA, 120 bp, synthetic construct
  source 1..120: mol_type = other DNA
taaaatatattcctaaaaattaatttctactttattaaaactctataaaaaaaattctacatatccctatacaataattaaaacacctactccctcacaaaaaaaataaacataacacaa

SEQ ID NO: 2324 - DNA, 120 bp, synthetic construct
  source 1..120: mol_type = other DNA
tgagatgtgtttttagaagttgatttttgttttattagagttttataagggaaattttgtatatttttgtatagtgattaagatatttgtttttttatagaaagaataaatatagtatag

SEQ ID NO: 2325 - DNA, 120 bp, synthetic construct; identical to SEQ ID NO: 2321
  source 1..120: mol_type = other DNA

SEQ ID NO: 2326 - DNA, 120 bp, synthetic construct; identical to SEQ ID NO: 2322
  source 1..120: mol_type = other DNA

SEQ ID NO: 2327 - DNA, 120 bp, synthetic construct; identical to SEQ ID NO: 2323
  source 1..120: mol_type = other DNA

SEQ ID NO: 2328 - DNA, 120 bp, synthetic construct; identical to SEQ ID NO: 2324
  source 1..120: mol_type = other DNA

SEQ ID NO: 2329 - DNA, 120 bp, synthetic construct
  source 1..120: mol_type = other DNA
aaataacaaaaaaaaataaatacataacacaataaaaacacaaacaaaaaaacccttaacaattcctataaaaaacttactttccataaaaaattataatattacctaaatcttaaaata

SEQ ID NO: 2330 - DNA, 120 bp, synthetic construct
  source 1..120: mol_type = other DNA
aggtggtagaaagaagtaggtatatggtatagtgggaatatagataaggaagtttttaataatttttatagagggtttgttttttataggaggttatgatgttatttgaattttaggatg

SEQ ID NO: 2331 - DNA, 120 bp, synthetic construct
  source 1..120: mol_type = other DNA
aaataacaaaaaaaaataaatacataacacaataaaaacacaaacaaaaaaacccttaactcttcctataaaaaacttactttccataaaaaattataatattacctaaatcttaaaata

SEQ ID NO: 2332 - DNA, 120 bp, synthetic construct
  source 1..120: mol_type = other DNA
aggtggtagaaagaagtaggtatatggtatagtgggaatatagataaggaagtttttaattttttttatagagggtttgttttttataggaggttatgatgttatttgaattttaggatg

SEQ ID NO: 2333 - DNA, 120 bp, synthetic construct; identical to SEQ ID NO: 2329
  source 1..120: mol_type = other DNA

SEQ ID NO: 2334 - DNA, 120 bp, synthetic construct; identical to SEQ ID NO: 2330
  source 1..120: mol_type = other DNA

SEQ ID NO: 2335 - DNA, 120 bp, synthetic construct; identical to SEQ ID NO: 2331
  source 1..120: mol_type = other DNA

SEQ ID NO: 2336 - DNA, 120 bp, synthetic construct; identical to SEQ ID NO: 2332
  source 1..120: mol_type = other DNA

SEQ ID NO: 2337 - DNA, 120 bp, synthetic construct
  source 1..120: mol_type = other DNA
tattatctattcacttaattaaatcatctctaaaaatacaaaacccaaacaacacaaaaaaccaactataattacaatctaaataaccaccataaaaacataaatcaccataaacataaa

SEQ ID NO: 2338 - DNA, 120 bp, synthetic construct
  source 1..120: mol_type = other DNA
tattgtttatttatttggttgaattatttttgaaggtgtagaatttaggtgatatagggggttaattgtaattgtaatttgaatgattattatgaagatataggttattatgaatatgaa

SEQ ID NO: 2339 - DNA, 120 bp, synthetic construct
  source 1..120: mol_type = other DNA
tattatctattcacttaattaaatcatctctaaaaatacaaaacccaaacaacacaaaaacacaactataattacaatctaaataaccaccataaaaacataaatcaccataaacataaa

SEQ ID NO: 2340 - DNA, 120 bp, synthetic construct
  source 1..120: mol_type = other DNA
tattgtttatttatttggttgaattatttttgaaggtgtagaatttaggtgatataggggtataattgtaattgtaatttgaatgattattatgaagatataggttattatgaatatgaa

SEQ ID NO: 2341 - DNA, 120 bp, synthetic construct
  source 1..120: mol_type = other DNA
tattatctattcacttaattaaatcatctctaaaaatacaaaacccaaacgacacaaaaaaccaactataattacaatctaaataaccaccataaaaacataaatcaccataaacataaa

SEQ ID NO: 2342 - DNA, 120 bp, synthetic construct
  source 1..120: mol_type = other DNA
tattgtttatttatttggttgaattatttttgaaggtgtagaatttaggcgatatagggggttaattgtaattgtaatttgaatgattattatgaagatataggttattatgaatatgaa

SEQ ID NO: 2343 - DNA, 120 bp, synthetic construct
  source 1..120: mol_type = other DNA
tattatctattcacttaattaaatcatctctaaaaatacaaaacccaaacgacacaaaaacacaactataattacaatctaaataaccaccataaaaacataaatcaccataaacataaa

SEQ ID NO: 2344 - DNA, 120 bp, synthetic construct
  source 1..120: mol_type = other DNA
tattgtttatttatttggttgaattatttttgaaggtgtagaatttaggcgatataggggtataattgtaattgtaatttgaatgattattatgaagatataggttattatgaatatgaa

SEQ ID NO: 2345 - DNA, 120 bp, synthetic construct
  source 1..120: mol_type = other DNA
cttctctaaaataatcccatactatcttcataaataacaacataaaaaaacaactaatttaccctataaaactattataaacattttcttattcttatactaatttaattattcattttt

SEQ ID NO: 2346 - DNA, 120 bp, synthetic construct
  source 1..120: mol_type = other DNA
tttttttgggatgattttatgttatttttatgggtaataatataaagaaataattggtttgttttgtaaagttgttataaatatttttttatttttgtattaatttgattatttattttt

SEQ ID NO: 2347 - DNA, 120 bp, synthetic construct
  source 1..120: mol_type = other DNA
cttctctaaaataatcccatactatcttcataaataacaacataaaaaaacaactaattttacctataaaactattataaacattttcttattcttatactaatttaattattcattttt

SEQ ID NO: 2348 - DNA, 120 bp, synthetic construct
  source 1..120: mol_type = other DNA
tttttttgggatgattttatgttatttttatgggtaataatataaagaaataattggttttatttgtaaagttgttataaatatttttttatttttgtattaatttgattatttattttt

SEQ ID NO: 2349 - DNA, 120 bp, synthetic construct; identical to SEQ ID NO: 2345
  source 1..120: mol_type = other DNA

SEQ ID NO: 2350 - DNA, 120 bp, synthetic construct; identical to SEQ ID NO: 2346
  source 1..120: mol_type = other DNA

SEQ ID NO: 2351 - DNA, 120 bp, synthetic construct; identical to SEQ ID NO: 2347
  source 1..120: mol_type = other DNA

SEQ ID NO: 2352 - DNA, 120 bp, synthetic construct; identical to SEQ ID NO: 2348
  source 1..120: mol_type = other DNA

SEQ ID NO: 2353 - DNA, 120 bp, synthetic construct
  source 1..120: mol_type = other DNA
tacctcaatttccttacctataaaataaatacataacaataacacttttttcataaaattactataaaatttcataaaaaaacccataaaaaacacttaaaataaattctcaacaaaaat

SEQ ID NO: 2354 - DNA, 120 bp, synthetic construct
  source 1..120: mol_type = other DNA
tgttttagtttttttgtttataaaatgggtatatggtaatagtattttttttatagggttgttgtgagattttatgagaaaatttatggaaagtatttagagtaagtttttaataagaat

SEQ ID NO: 2355 - DNA, 120 bp, synthetic construct
  source 1..120: mol_type = other DNA
tacctcaatttccttacctataaaataaatacataacaataacacttttttcataaaatttatataaaatttcataaaaaaacccataaaaaacacttaaaataaattctcaacaaaaat

SEQ ID NO: 2356 - DNA, 120 bp, synthetic construct
  source 1..120: mol_type = other DNA
tgttttagtttttttgtttataaaatgggtatatggtaatagtattttttttatagggtttgtgtgagattttatgagaaaatttatggaaagtatttagagtaagtttttaataagaat

SEQ ID NO: 2357 - DNA, 120 bp, synthetic construct; identical to SEQ ID NO: 2353
  source 1..120: mol_type = other DNA

SEQ ID NO: 2358 - DNA, 120 bp, synthetic construct; identical to SEQ ID NO: 2354
  source 1..120: mol_type = other DNA

SEQ ID NO: 2359 - DNA, 120 bp, synthetic construct; identical to SEQ ID NO: 2355
  source 1..120: mol_type = other DNA

SEQ ID NO: 2360 - DNA, 120 bp, synthetic construct; identical to SEQ ID NO: 2356
  source 1..120: mol_type = other DNA

SEQ ID NO: 2361 - DNA, 120 bp, synthetic construct
  source 1..120: mol_type = other DNA
actcaataaactctacattattctaacaacttaatcttttaaataaaaatattttatattaaaataaacacttcaataattcatctcaccaacatcaaaaaccacttcaaataaaacaaa

SEQ ID NO: 2362 - DNA, 120 bp, synthetic construct
  source 1..120: mol_type = other DNA
atttaatgaattttatgttattttaataatttgattttttaggtaaaaatattttatattgaggtaagtattttaatggtttattttattagtattaaagattattttaaataagataag

SEQ ID NO: 2363 - DNA, 120 bp, synthetic construct
  source 1..120: mol_type = other DNA
actcaataaactctacattattctaacaacttaatcttttaaataaaaatattttatattttaataaacacttcaataattcatctcaccaacatcaaaaaccacttcaaataaaacaaa

SEQ ID NO: 2364 - DNA, 120 bp, synthetic construct
  source 1..120: mol_type = other DNA
atttaatgaattttatgttattttaataatttgattttttaggtaaaaatattttatattttggtaagtattttaatggtttattttattagtattaaagattattttaaataagataag

SEQ ID NO: 2365 - DNA, 120 bp, synthetic construct
  source 1..120: mol_type = other DNA
actcaataaactctacgttattctaacaacttaatcttttaaataaaaatattttatattaaaataaacacttcaataattcatctcaccaacatcaaaaaccacttcaaataaaacaaa

SEQ ID NO: 2366 - DNA, 120 bp, synthetic construct
  source 1..120: mol_type = other DNA
atttaatgaattttacgttattttaataatttgattttttaggtaaaaatattttatattgaggtaagtattttaatggtttattttattagtattaaagattattttaaataagataag

SEQ ID NO: 2367 - DNA, 120 bp, synthetic construct
  source 1..120: mol_type = other DNA
actcaataaactctacgttattctaacaacttaatcttttaaataaaaatattttatattttaataaacacttcaataattcatctcaccaacatcaaaaaccacttcaaataaaacaaa

SEQ ID NO: 2368 - DNA, 120 bp, synthetic construct
  source 1..120: mol_type = other DNA
atttaatgaattttacgttattttaataatttgattttttaggtaaaaatattttatattttggtaagtattttaatggtttattttattagtattaaagattattttaaataagataag

SEQ ID NO: 2369 - DNA, 120 bp, synthetic construct
  source 1..120: mol_type = other DNA
aaaataaaactattactaacaataataaattccatattattttttcattaaatccaatactcatctaatattaattttaccaaatttctatcatttctttattactaaaaattttattat

SEQ ID NO: 2370 - DNA, 120 bp, synthetic construct
  source 1..120: mol_type = other DNA
ggaataaaattattattgatagtgatggattttatgttatttttttattaaatttaatatttatttgatgttgattttgttaaatttttgttatttttttattgttgaggattttattgt

SEQ ID NO: 2371 - DNA, 120 bp, synthetic construct
  source 1..120: mol_type = other DNA
aaaataaaactattactaacaataataaattccatattattttttcattaaatccaaaactcaactaatattaattttaccaaatttctatcatttctttattactaaaaattttattat

SEQ ID NO: 2372 - DNA, 120 bp, synthetic construct
  source 1..120: mol_type = other DNA
ggaataaaattattattgatagtgatggattttatgttatttttttattaaatttaaaatttaattgatgttgattttgttaaatttttgttatttttttattgttgaggattttattgt

SEQ ID NO: 2373 - DNA, 120 bp, synthetic construct; identical to SEQ ID NO: 2369
  source 1..120: mol_type = other DNA

SEQ ID NO: 2374 - DNA, 120 bp, synthetic construct; identical to SEQ ID NO: 2370
  source 1..120: mol_type = other DNA

SEQ ID NO: 2375 - DNA, 120 bp, synthetic construct; identical to SEQ ID NO: 2371
  source 1..120: mol_type = other DNA

SEQ ID NO: 2376 - DNA, 120 bp, synthetic construct; identical to SEQ ID NO: 2372
  source 1..120: mol_type = other DNA

SEQ ID NO: 2377 - DNA, 120 bp, synthetic construct
  source 1..120: mol_type = other DNA
aacaatcaaaaatataacatacaaaattcaaatattttacttcaaacctcaaaataatatccataactaacaatacaactaacaactcttaatctaatcctaaatttataatccccaaat

SEQ ID NO: 2378 - DNA, 120 bp, synthetic construct
  source 1..120: mol_type = other DNA
gatggttaagggtataatatataagatttaggtattttattttaggttttgaaatgatgtttgtggttggtaatatagttgatagtttttagtttggttttggatttatgatttttaggt

SEQ ID NO: 2379 - DNA, 120 bp, synthetic construct
  source 1..120: mol_type = other DNA
aacaatcaaaaatataacatacaaaattcaaatattttacttcaaacctcaaaataataacaataactaacaatacaactaacaactcttaatctaatcctaaatttataatccccaaat

SEQ ID NO: 2380 - DNA, 120 bp, synthetic construct
  source 1..120: mol_type = other DNA
gatggttaagggtataatatataagatttaggtattttattttaggttttgaaatgatggtggtggttggtaatatagttgatagtttttagtttggttttggatttatgatttttaggt

SEQ ID NO: 2381 - DNA, 120 bp, synthetic construct
  source 1..120: mol_type = other DNA
aacgatcaaaaatataacatacaaaattcaaatattttacttcaaacctcgaaataatatccgtaactaacaatacaactaacaactcttaatctaatcctaaatttataatccccaaat

SEQ ID NO: 2382 - DNA, 120 bp, synthetic construct
  source 1..120: mol_type = other DNA
gacggttaagggtataatatataagatttaggtattttattttaggtttcgaaatgatgttcgtggttggtaatatagttgatagtttttagtttggttttggatttatgatttttaggt

SEQ ID NO: 2383 - DNA, 120 bp, synthetic construct
  source 1..120: mol_type = other DNA
aacgatcaaaaatataacatacaaaattcaaatattttacttcaaacctcgaaataataacgataactaacaatacaactaacaactcttaatctaatcctaaatttataatccccaaat

SEQ ID NO: 2384 - DNA, 120 bp, synthetic construct
  source 1..120: mol_type = other DNA
gacggttaagggtataatatataagatttaggtattttattttaggtttcgaaatgatggcggtggttggtaatatagttgatagtttttagtttggttttggatttatgatttttaggt

SEQ ID NO: 2385 - DNA, 120 bp, synthetic construct
  source 1..120: mol_type = other DNA
acaaaaatccccaaatacaaataacaaaaattcccaaaacaaaataaaccacaaaaattcaaaaaactaacaacaaatataaaaaattttaaaaaaaattacccaaactaattaaatata

SEQ ID NO: 2386 - DNA, 120 bp, synthetic construct
  source 1..120: mol_type = other DNA
atggaggtttttaagtgtagatgatagaagtttttaagataaaatgagttataggaatttggagggttggtagtagatgtgagaggttttggaagaaattatttaggttaattaaatgtg

SEQ ID NO: 2387 - DNA, 120 bp, synthetic construct
  source 1..120: mol_type = other DNA
acaaaaatccccaaatacaaataacaaaaattcccaaaacaaaataaaccacaaaaattcccaaaactaacaacaaatataaaaaattttaaaaaaaattacccaaactaattaaatata

SEQ ID NO: 2388 - DNA, 120 bp, synthetic construct
  source 1..120: mol_type = other DNA
atggaggtttttaagtgtagatgatagaagtttttaagataaaatgagttataggaatttttagggttggtagtagatgtgagaggttttggaagaaattatttaggttaattaaatgtg

SEQ ID NO: 2389 - DNA, 120 bp, synthetic construct
  source 1..120: mol_type = other DNA
acgaaaatccccaaatacaaataacaaaaattcccaaaacaaaataaaccacaaaaattcgaaaaactaacaacaaatataaaaaattttaaaaaaaattacccaaactaattaaatata

SEQ ID NO: 2390 - DNA, 120 bp, synthetic construct
  source 1..120: mol_type = other DNA
acggaggtttttaagtgtagatgatagaagtttttaagataaaatgagttataggaattcggagggttggtagtagatgtgagaggttttggaagaaattatttaggttaattaaatgtg

SEQ ID NO: 2391 - DNA, 120 bp, synthetic construct
  source 1..120: mol_type = other DNA
acgaaaatccccaaatacaaataacaaaaattcccaaaacaaaataaaccacaaaaattcccaaaactaacaacaaatataaaaaattttaaaaaaaattacccaaactaattaaatata

SEQ ID NO: 2392 - DNA, 120 bp, synthetic construct
  source 1..120: mol_type = other DNA
acggaggtttttaagtgtagatgatagaagtttttaagataaaatgagttataggaatttttagggttggtagtagatgtgagaggttttggaagaaattatttaggttaattaaatgtg

SEQ ID NO: 2393 - DNA, 120 bp, synthetic construct
  source 1..120: mol_type = other DNA
aaatatccaaaaaataaacccaccaacctaactctctccctccctctatttaattttttcaaaaatactactctataataaactacactcatataataattactatattatacatttact

SEQ ID NO: 2394 - DNA, 120 bp, synthetic construct
  source 1..120: mol_type = other DNA
ggatgtttaagggatgaatttattagtttgattttttttttttttttgtttgatttttttaggagtgttattttgtgataggttgtatttatgtgatgattattgtattgtgtatttgtt

SEQ ID NO: 2395 - DNA, 120 bp, synthetic construct
  source 1..120: mol_type = other DNA
aaatatccaaaaaataaacccaccaacctaactctctccctccctctatttaattttttcttaaatactactctataataaactacactcatataataattactatattatacatttact

SEQ ID NO: 2396 - DNA, 120 bp, synthetic construct
  source 1..120: mol_type = other DNA
ggatgtttaagggatgaatttattagtttgattttttttttttttttgtttgatttttttttgagtgttattttgtgataggttgtatttatgtgatgattattgtattgtgtatttgtt

SEQ ID NO: 2397 - DNA, 120 bp, synthetic construct; identical to SEQ ID NO: 2393
  source 1..120: mol_type = other DNA

SEQ ID NO: 2398 - DNA, 120 bp, synthetic construct; identical to SEQ ID NO: 2394
  source 1..120: mol_type = other DNA

SEQ ID NO: 2399 - DNA, 120 bp, synthetic construct; identical to SEQ ID NO: 2395
  source 1..120: mol_type = other DNA

SEQ ID NO: 2400 - DNA, 120 bp, synthetic construct; identical to SEQ ID NO: 2396
  source 1..120: mol_type = other DNA

SEQ ID NO: 2401 - DNA, 120 bp, synthetic construct
  source 1..120: mol_type = other DNA
cttaccctaaacacaacttatttctccaatccctataacactataaaatccttcaatttccaactacatttaaaattcattaaatatcattaaaaaataataacaaaatttattacaata

SEQ ID NO: 2402 - DNA, 120 bp, synthetic construct
  source 1..120: mol_type = other DNA
tttgttttaagtatagtttgtttttttaatttttgtggtattatggaattttttagtttttgattatatttgaaatttattaaatattattaaaaaatgatagtaaagtttattgtaatg

SEQ ID NO: 2403 - DNA, 120 bp, synthetic construct
  source 1..120: mol_type = other DNA
cttaccctaaacacaacttatttctccaatccctataacactataaaatccttcaatttcacactacatttaaaattcattaaatatcattaaaaaataataacaaaatttattacaata

SEQ ID NO: 2404 - DNA, 120 bp, synthetic construct
  source 1..120: mol_type = other DNA
tttgttttaagtatagtttgtttttttaatttttgtggtattatggaattttttagttttatattatatttgaaatttattaaatattattaaaaaatgatagtaaagtttattgtaatg

SEQ ID NO: 2405 - DNA, 120 bp, synthetic construct
  source 1..120: mol_type = other DNA
cttaccctaaacacaacttatttctccaatccctataacactataaaatccttcaatttccgactacatttaaaattcattaaatatcattaaaaaataataacaaaatttattacaata

SEQ ID NO: 2406 - DNA, 120 bp, synthetic construct
  source 1..120: mol_type = other DNA
tttgttttaagtatagtttgtttttttaatttttgtggtattatggaattttttagttttcgattatatttgaaatttattaaatattattaaaaaatgatagtaaagtttattgtaatg

SEQ ID NO: 2407 - DNA, 120 bp, synthetic construct; identical to SEQ ID NO: 2403
  source 1..120: mol_type = other DNA

SEQ ID NO: 2408 - DNA, 120 bp, synthetic construct; identical to SEQ ID NO: 2404
  source 1..120: mol_type = other DNA

SEQ ID NO: 2409 - DNA, 120 bp, synthetic construct
  source 1..120: mol_type = other DNA
ataaaactacaattctctttttaacttctatttactacaaacaccattatttttaaaaatatccttaaacttaacattcccacaatttactaccaataaaataatttcttttaaaaaaaa

SEQ ID NO: 2410 - DNA, 120 bp, synthetic construct
  source 1..120: mol_type = other DNA
atgaagttataattttttttttaatttttgtttattataaatattattgtttttgaaagtatttttgggtttaatatttttatagtttgttgttaataaagtaattttttttaggagaga

SEQ ID NO: 2411 - DNA, 120 bp, synthetic construct
  source 1..120: mol_type = other DNA
ataaaactacaattctctttttaacttctatttactacaaacaccattatttttaaaaattaccttaaacttaacattcccacaatttactaccaataaaataatttcttttaaaaaaaa

SEQ ID NO: 2412 - DNA, 120 bp, synthetic construct
  source 1..120: mol_type = other DNA
atgaagttataattttttttttaatttttgtttattataaatattattgtttttgaaagttattttgggtttaatatttttatagtttgttgttaataaagtaattttttttaggagaga

SEQ ID NO: 2413 - DNA, 120 bp, synthetic construct; identical to SEQ ID NO: 2409
  source 1..120: mol_type = other DNA

SEQ ID NO: 2414 - DNA, 120 bp, synthetic construct; identical to SEQ ID NO: 2410
  source 1..120: mol_type = other DNA

SEQ ID NO: 2415 - DNA, 120 bp, synthetic construct; identical to SEQ ID NO: 2411
  source 1..120: mol_type = other DNA

SEQ ID NO: 2416 - DNA, 120 bp, synthetic construct; identical to SEQ ID NO: 2412
  source 1..120: mol_type = other DNA

SEQ ID NO: 2417 - DNA, 120 bp, synthetic construct
  source 1..120: mol_type = other DNA
ataaaacccaatatctctcctaaatccctacacctccctaaccccaaaacccccctataactccatctaaaacaaacactaatactacccaatactcaaaactaaataaaaaaaaaatta

SEQ ID NO: 2418 - DNA, 120 bp, synthetic construct
  source 1..120: mol_type = other DNA
atggagtttagtgttttttttgggtttttgtatttttttggttttgagatttttttgtgattttatttggggtaaatattgatgttgtttaatgtttagggttgggtgaggagggggttg

SEQ ID NO: 2419 - DNA, 120 bp, synthetic construct
  source 1..120: mol_type = other DNA
ataaaacccaatatctctcctaaatccctacacctccctaaccccaaaacccccctctaactccctctaaaacaaacactaatactacccaatactcaaaactaaataaaaaaaaaatta

SEQ ID NO: 2420 - DNA, 120 bp, synthetic construct
  source 1..120: mol_type = other DNA
atggagtttagtgttttttttgggtttttgtatttttttggttttgagatttttttttgattttttttggggtaaatattgatgttgtttaatgtttagggttgggtgaggagggggttg

SEQ ID NO: 2421 - DNA, 120 bp, synthetic construct
  source 1..120: mol_type = other DNA
ataaaacccaatatctctcctaaatccctacacctccctaaccccgaaacccccctataactccatctaaaacaaacactaatactacccaatactcaaaactaaataaaaaaaaaatta

SEQ ID NO: 2422 - DNA, 120 bp, synthetic construct
  source 1..120: mol_type = other DNA
atggagtttagtgttttttttgggtttttgtatttttttggtttcgagatttttttgtgattttatttggggtaaatattgatgttgtttaatgtttagggttgggtgaggagggggttg

SEQ ID NO: 2423 - DNA, 120 bp, synthetic construct
  source 1..120: mol_type = other DNA
ataaaacccaatatctctcctaaatccctacacctccctaaccccgaaacccccctctaactccctctaaaacaaacactaatactacccaatactcaaaactaaataaaaaaaaaatta

SEQ ID NO: 2424 - DNA, 120 bp, synthetic construct
  source 1..120: mol_type = other DNA
atggagtttagtgttttttttgggtttttgtatttttttggtttcgagatttttttttgattttttttggggtaaatattgatgttgtttaatgtttagggttgggtgaggagggggttg

SEQ ID NO: 2425 - DNA, 120 bp, synthetic construct
  source 1..120: mol_type = other DNA
aaactaatactataataaaaaatctattatattaaaatataaatcaaaataaaaaaacttcctactaaaaaatcacataaatccacaaaattaaaacaaacaaccaaaaaaaaaacaaaa

SEQ ID NO: 2426 - DNA, 120 bp, synthetic construct
  source 1..120: mol_type = other DNA
gagttggtgttataatgggggatttgttatgttgagatgtggattagaatgagaaagttttttgttggaggattatataaatttatagagttaggataggtagttaagaaaaaggtagag

SEQ ID NO: 2427 - DNA, 120 bp, synthetic construct
  source 1..120: mol_type = other DNA
aaactaatactataataaaaaatctattatattaaaatataaatcaaaataaaaaaaattcctaataaaaaatcacataaatccacaaaattaaaacaaacaaccaaaaaaaaaacaaaa

SEQ ID NO: 2428 - DNA, 120 bp, synthetic construct
  source 1..120: mol_type = other DNA
gagttggtgttataatgggggatttgttatgttgagatgtggattagaatgagaaaggtttttgatggaggattatataaatttatagagttaggataggtagttaagaaaaaggtagag

SEQ ID NO: 2429 - DNA, 120 bp, synthetic construct; identical to SEQ ID NO: 2425
  source 1..120: mol_type = other DNA

SEQ ID NO: 2430 - DNA, 120 bp, synthetic construct; identical to SEQ ID NO: 2426
  source 1..120: mol_type = other DNA

SEQ ID NO: 2431 - DNA, 120 bp, synthetic construct; identical to SEQ ID NO: 2427
  source 1..120: mol_type = other DNA

SEQ ID NO: 2432 - DNA, 120 bp, synthetic construct; identical to SEQ ID NO: 2428
  source 1..120: mol_type = other DNA

SEQ ID NO: 2433 - DNA, 120 bp, synthetic construct
  source 1..120: mol_type = other DNA
acataccatcctacactcaactaacaaacctaacacaaaatatactcctaaccaacataaaaaaccaaaatctctactaaaccccataaaacatcactcaaaaacacccaaaacaaaaaa

SEQ ID NO: 2434 - DNA, 120 bp, synthetic construct
  source 1..120: mol_type = other DNA
gtatgttattttgtatttagttggtgagtttggtgtaggatgtgtttttggttagtgtgggggattagagtttttgttggattttatggggtattgtttaggagtatttaggatagggag

SEQ ID NO: 2435 - DNA, 120 bp, synthetic construct
  source 1..120: mol_type = other DNA
acataccatcctacactcaactaacaaacctaacacaaaatatactcctaaccaacaaaaaaatccaaaatctctactaaaccccataaaacatcactcaaaaacacccaaaacaaaaaa

SEQ ID NO: 2436 - DNA, 120 bp, synthetic construct
  source 1..120: mol_type = other DNA
gtatgttattttgtatttagttggtgagtttggtgtaggatgtgtttttggttagtgggggggtttagagtttttgttggattttatggggtattgtttaggagtatttaggatagggag

SEQ ID NO: 2437 - DNA, 120 bp, synthetic construct
  source 1..120: mol_type = other DNA
acataccatcctacactcaactaacgaacctaacgcaaaatatactcctaaccaacgtaaaaaaccaaaatctctactaaaccccataaaacatcgctcaaaaacacccaaaacaaaaaa

SEQ ID NO: 2438 - DNA, 120 bp, synthetic construct
  source 1..120: mol_type = other DNA
gtatgttattttgtatttagttggcgagtttggcgtaggatgtgtttttggttagcgtgggggattagagtttttgttggattttatggggtatcgtttaggagtatttaggatagggag

SEQ ID NO: 2439 - DNA, 120 bp, synthetic construct
  source 1..120: mol_type = other DNA
acataccatcctacactcaactaacgaacctaacgcaaaatatactcctaaccaacgaaaaaatccaaaatctctactaaaccccataaaacatcgctcaaaaacacccaaaacaaaaaa

SEQ ID NO: 2440 - DNA, 120 bp, synthetic construct
  source 1..120: mol_type = other DNA
gtatgttattttgtatttagttggcgagtttggcgtaggatgtgtttttggttagcgggggggtttagagtttttgttggattttatggggtatcgtttaggagtatttaggatagggag

SEQ ID NO: 2441 - DNA, 120 bp, synthetic construct
  source 1..120: mol_type = other DNA
attttcaataattcaataattaacactaatatttttatataataatttataaaaactttaattattataatcaacaaatattattaaatatactatattaaccattaaaataaaaataca

SEQ ID NO: 2442 - DNA, 120 bp, synthetic construct
  source 1..120: mol_type = other DNA
atttttagtaatttagtaattaatattaatatttttatgtagtggtttgtaagagttttaattattgtagttaataagtattattaaatgtgttatattagttattgaggtgagaatgta

SEQ ID NO: 2443 - DNA, 120 bp, synthetic construct
  source 1..120: mol_type = other DNA
attttcaataattcaataattaacactaatatttttatataataatttataaaaaatttaattataataatcaacaaatattattaaatatactatattaaccattaaaataaaaataca

SEQ ID NO: 2444 - DNA, 120 bp, synthetic construct
  source 1..120: mol_type = other DNA
atttttagtaatttagtaattaatattaatatttttatgtagtggtttgtaagagatttaattatggtagttaataagtattattaaatgtgttatattagttattgaggtgagaatgta

SEQ ID NO: 2445 - DNA, 120 bp, synthetic construct; identical to SEQ ID NO: 2441
  source 1..120: mol_type = other DNA

SEQ ID NO: 2446 - DNA, 120 bp, synthetic construct; identical to SEQ ID NO: 2442
  source 1..120: mol_type = other DNA

SEQ ID NO: 2447 - DNA, 120 bp, synthetic construct; identical to SEQ ID NO: 2443
  source 1..120: mol_type = other DNA

SEQ ID NO: 2448 - DNA, 120 bp, synthetic construct; identical to SEQ ID NO: 2444
  source 1..120: mol_type = other DNA

SEQ ID NO: 2449 - DNA, 120 bp, synthetic construct
  source 1..120: mol_type = other DNA
ataacaactaaactaccacacaacaaaccttcacaatacttttactttctccacaacattaaaacctcacctcataatactaacttcaaaactattataacaaactacaaacatccacaa

SEQ ID NO: 2450 - DNA, 120 bp, synthetic construct
  source 1..120: mol_type = other DNA
gtgataattaaattattatatagtaagtttttgtagtgtttttattttttttatagtattaaagttttgttttgtggtattgattttaaaattgttataataaattataaatatttgtaa

SEQ ID NO: 2451 - DNA, 120 bp, synthetic construct
  source 1..120: mol_type = other DNA
ataacaactaaactaccacacaacaaaccttcacaatacttttactttctccacaacataataacctcacctcataatactaacttcaaaactattataacaaactacaaacatccacaa

SEQ ID NO: 2452 - DNA, 120 bp, synthetic construct
  source 1..120: mol_type = other DNA
gtgataattaaattattatatagtaagtttttgtagtgtttttattttttttatagtatgatagttttgttttgtggtattgattttaaaattgttataataaattataaatatttgtaa

SEQ ID NO: 2453 - DNA, 120 bp, synthetic construct
  source 1..120: mol_type = other DNA
ataacaactaaactaccacacaacaaaccttcgcaatacttttactttctccacaacattaaaacctcgcctcgtaatactaacttcaaaactattataacaaactacaaacatccgcaa

SEQ ID NO: 2454 - DNA, 120 bp, synthetic construct
  source 1..120: mol_type = other DNA
gtgataattaaattattatatagtaagttttcgtagtgtttttattttttttatagtattaaagtttcgtttcgtggtattgattttaaaattgttataataaattataaatattcgtaa

SEQ ID NO: 2455 - DNA, 120 bp, synthetic construct
  source 1..120: mol_type = other DNA
ataacaactaaactaccacacaacaaaccttcgcaatacttttactttctccacaacataataacctcgcctcgtaatactaacttcaaaactattataacaaactacaaacatccgcaa

SEQ ID NO: 2456 - DNA, 120 bp, synthetic construct
  source 1..120: mol_type = other DNA
gtgataattaaattattatatagtaagttttcgtagtgtttttattttttttatagtatgatagtttcgtttcgtggtattgattttaaaattgttataataaattataaatattcgtaa

SEQ ID NO: 2457 - DNA, 120 bp, synthetic construct
  source 1..120: mol_type = other DNA
ttcataattttcaaaactctttattctataaactttattcttcatactacataaaaatttatatcaaacaaaaataaaaaaaaaacttttaaactcctaaataaaaccttaaacctaaac

SEQ ID NO: 2458 - DNA, 120 bp, synthetic construct
  source 1..120: mol_type = other DNA
tttataatttttagagttttttattttatgaattttattttttatattatataggaatttgtattaagtagaaataagagaaaagtttttgggtttttagatgaaattttaagtttaagt

SEQ ID NO: 2459 - DNA, 120 bp, synthetic construct
  source 1..120: mol_type = other DNA
ttcataattttcaaaactctttattctataaactttattcttcatactacataaaaattaaaatcaaacaaaaataaaaaaaaaacttttaaactcctaaataaaaccttaaacctaaac

SEQ ID NO: 2460 - DNA, 120 bp, synthetic construct
  source 1..120: mol_type = other DNA
tttataatttttagagttttttattttatgaattttattttttatattatataggaattggaattaagtagaaataagagaaaagtttttgggtttttagatgaaattttaagtttaagt

SEQ ID NO: 2461 - DNA, 120 bp, synthetic construct; identical to SEQ ID NO: 2457
  source 1..120: mol_type = other DNA

SEQ ID NO: 2462 - DNA, 120 bp, synthetic construct; identical to SEQ ID NO: 2458
  source 1..120: mol_type = other DNA

SEQ ID NO: 2463 - DNA, 120 bp, synthetic construct; identical to SEQ ID NO: 2459
  source 1..120: mol_type = other DNA

SEQ ID NO: 2464 - DNA, 120 bp, synthetic construct; identical to SEQ ID NO: 2460
  source 1..120: mol_type = other DNA

SEQ ID NO: 2465 - DNA, 120 bp, synthetic construct
  source 1..120: mol_type = other DNA
cctaaatcacaacttaacatctccctcaaaacaataacccaaaataatcaaaaaatccaacctatcttccatctaacaaaaattacatctttcttacctaatatctcatatcttaaaaat

SEQ ID NO: 2466 - DNA, 120 bp, synthetic construct
  source 1..120: mol_type = other DNA
tttgaattataatttagtattttttttaaaatggtaatttagagtaattagagaatttgatttgttttttgtttagtaggaattatgttttttttgtttgatgttttatgttttgaaagt

SEQ ID NO: 2467 - DNA, 120 bp, synthetic construct
  source 1..120: mol_type = other DNA
cctaaatcacaacttaacatctccctcaaaacaataacccaaaataatcaaaaaatccaccatatcttccatctaacaaaaattacatctttcttacctaatatctcatatcttaaaaat

SEQ ID NO: 2468 - DNA, 120 bp, synthetic construct
  source 1..120: mol_type = other DNA
tttgaattataatttagtattttttttaaaatggtaatttagagtaattagagaatttgttatgttttttgtttagtaggaattatgttttttttgtttgatgttttatgttttgaaagt

SEQ ID NO: 2469 - DNA, 120 bp, synthetic construct
  source 1..120: mol_type = other DNA
cctaaatcacaacttaacatctccctcaaaacgataacccaaaataatcaaaaaatccgacctatcttccgtctaacaaaaattacgtctttcttacctaatatctcatatcttaaaaat

SEQ ID NO: 2470 - DNA, 120 bp, synthetic construct
  source 1..120: mol_type = other DNA
tttgaattataatttagtattttttttaaaacggtaatttagagtaattagagaattcgatttgtttttcgtttagtaggaattacgttttttttgtttgatgttttatgttttgaaagt

SEQ ID NO: 2471 - DNA, 120 bp, synthetic construct
  source 1..120: mol_type = other DNA
cctaaatcacaacttaacatctccctcaaaacgataacccaaaataatcaaaaaatccgccatatcttccgtctaacaaaaattacgtctttcttacctaatatctcatatcttaaaaat

SEQ ID NO: 2472 - DNA, 120 bp, synthetic construct
  source 1..120: mol_type = other DNA
tttgaattataatttagtattttttttaaaacggtaatttagagtaattagagaattcgttatgtttttcgtttagtaggaattacgttttttttgtttgatgttttatgttttgaaagt

SEQ ID NO: 2473 - DNA, 120 bp, synthetic construct
  source 1..120: mol_type = other DNA
aatctaatatacttcaattaacaaaaaattatacctatttaaacatttaattacctaaataaaccaaataaataaattattacaatcaaaaaaaaatatcaaaaataaaacccaaatcat

SEQ ID NO: 2474 - DNA, 120 bp, synthetic construct
  source 1..120: mol_type = other DNA
aatttggtgtgttttagttggtaggaagttgtatttatttaaatatttaattgtttgaataagttagatggataagttattgtaattagaagaaaatattaaagataaaatttaaattat

SEQ ID NO: 2475 - DNA, 120 bp, synthetic construct
  source 1..120: mol_type = other DNA
aatctaatatacttcaattaacaaaaaattatacctatttaaacatttaattacctaaaaataccaaataaataaattattacaatcaaaaaaaaatatcaaaaataaaacccaaatcat

SEQ ID NO: 2476 - DNA, 120 bp, synthetic construct
  source 1..120: mol_type = other DNA
aatttggtgtgttttagttggtaggaagttgtatttatttaaatatttaattgtttgaaaatgttagatggataagttattgtaattagaagaaaatattaaagataaaatttaaattat

SEQ ID NO: 2477 - DNA, 120 bp, synthetic construct; identical to SEQ ID NO: 2473
  source 1..120: mol_type = other DNA

SEQ ID NO: 2478 - DNA, 120 bp, synthetic construct; identical to SEQ ID NO: 2474
  source 1..120: mol_type = other DNA

SEQ ID NO: 2479 - DNA, 120 bp, synthetic construct; identical to SEQ ID NO: 2475
  source 1..120: mol_type = other DNA

SEQ ID NO: 2480 - DNA, 120 bp, synthetic construct; identical to SEQ ID NO: 2476
  source 1..120: mol_type = other DNA

SEQ ID NO: 2481 - DNA, 120 bp, synthetic construct
  source 1..120: mol_type = other DNA
cacaacaaaataaaacccaaacataataaaactaaaccttacccacaacaacctaactcatcaaaaaacctctaatttaaaaaaaaacaacaaacacacaaacccaaacaaaaaaaaatc

SEQ ID NO: 2482 - DNA, 120 bp, synthetic construct
  source 1..120: mol_type = other DNA
tgtagtaagatggggtttaggtatggtggggttggattttgtttgtagtagtttgatttattggggagtttttggtttgggggagagtagtaggtatgtaggtttgggtgggaggaggtt

SEQ ID NO: 2483 - DNA, 120 bp, synthetic construct
  source 1..120: mol_type = other DNA
cacaacaaaataaaacccaaacataataaaactaaaccttacccacaacaacctaactcctaaaaaaacctctaatttaaaaaaaaacaacaaacacacaaacccaaacaaaaaaaaatc

SEQ ID NO: 2484 - DNA, 120 bp, synthetic construct
  source 1..120: mol_type = other DNA
tgtagtaagatggggtttaggtatggtggggttggattttgtttgtagtagtttgatttttgggggagtttttggtttgggggagagtagtaggtatgtaggtttgggtgggaggaggtt

SEQ ID NO: 2485 - DNA, 120 bp, synthetic construct
  source 1..120: mol_type = other DNA
cgcaacaaaataaaacccaaacataataaaactaaaccttacccgcaacaacctaactcatcgaaaaacctctaatttaaaaaaaaacaacaaacacgcaaacccgaacgaaaaaaaatc

SEQ ID NO: 2486 - DNA, 120 bp, synthetic construct
  source 1..120: mol_type = other DNA
cgtagtaagatggggtttaggtatggtggggttggattttgttcgtagtagtttgatttatcggggagtttttggtttgggggagagtagtaggtacgtaggttcgggcgggaggaggtt

SEQ ID NO: 2487 - DNA, 120 bp, synthetic construct
  source 1..120: mol_type = other DNA
cgcaacaaaataaaacccaaacataataaaactaaaccttacccgcaacaacctaactcctaaaaaaacctctaatttaaaaaaaaacaacaaacacgcaaacccgaacgaaaaaaaatc

SEQ ID NO: 2488 - DNA, 120 bp, synthetic construct
  source 1..120: mol_type = other DNA
cgtagtaagatggggtttaggtatggtggggttggattttgttcgtagtagtttgatttttgggggagtttttggtttgggggagagtagtaggtacgtaggttcgggcgggaggaggtt

SEQ ID NO: 2489 - DNA, 120 bp, synthetic construct
  source 1..120: mol_type = other DNA
actataatctttttatcccttaatatttaaaaaatatctatttaaatccctacaaaaaatctttaccctcttaaacactattatacattccctaaaattcacattaacataattactact

SEQ ID NO: 2490 - DNA, 120 bp, synthetic construct
  source 1..120: mol_type = other DNA
gttatgatttttttgttttttaatatttgaaaaatatttatttaaatttttgtagaagatttttgtttttttaaatattgttatatattttttggagtttatattagtatgattgttgtt

SEQ ID NO: 2491 - DNA, 120 bp, synthetic construct
  source 1..120: mol_type = other DNA
actataatctttttatcccttaatatttaaaaaatatctatttaaatccctacaaaaaaactataccctcttaaacactattatacattccctaaaattcacattaacataattactact

SEQ ID NO: 2492 - DNA, 120 bp, synthetic construct
  source 1..120: mol_type = other DNA
gttatgatttttttgttttttaatatttgaaaaatatttatttaaatttttgtagaagagttatgtttttttaaatattgttatatattttttggagtttatattagtatgattgttgtt

SEQ ID NO: 2493 - DNA, 120 bp, synthetic construct; identical to SEQ ID NO: 2489
  source 1..120: mol_type = other DNA

SEQ ID NO: 2494 - DNA, 120 bp, synthetic construct; identical to SEQ ID NO: 2490
  source 1..120: mol_type = other DNA

SEQ ID NO: 2495 - DNA, 120 bp, synthetic construct; identical to SEQ ID NO: 2491
  source 1..120: mol_type = other DNA

SEQ ID NO: 2496 - DNA, 120 bp, synthetic construct; identical to SEQ ID NO: 2492
  source 1..120: mol_type = other DNA

SEQ ID NO: 2497 - DNA, 120 bp, synthetic construct
  source 1..120: mol_type = other DNA
aaaaaatataaaacaccatacaaatataaaataaaacaattaattactaatattatcactcaaaataactatatatttcaaaaaccaaaaaactatcttataaatccaattaaaaaaaaa

SEQ ID NO: 2498 - DNA, 120 bp, synthetic construct
  source 1..120: mol_type = other DNA
gaaaagtataaaatattatataaatgtaaggtagagtaattaattgttagtattattatttagaatgattatgtattttagaggttaggaagttattttgtaaatttagttagaaaaggg

SEQ ID NO: 2499 - DNA, 120 bp, synthetic construct
  source 1..120: mol_type = other DNA
aaaaaatataaaacaccatacaaatataaaataaaacaattaattactaatattatcacacacaataactatatatttcaaaaaccaaaaaactatcttataaatccaattaaaaaaaaa

SEQ ID NO: 2500 - DNA, 120 bp, synthetic construct
  source 1..120: mol_type = other DNA
gaaaagtataaaatattatataaatgtaaggtagagtaattaattgttagtattattatgtataatgattatgtattttagaggttaggaagttattttgtaaatttagttagaaaaggg

SEQ ID NO: 2501 - DNA, 120 bp, synthetic construct; identical to SEQ ID NO: 2497
  source 1..120: mol_type = other DNA

SEQ ID NO: 2502 - DNA, 120 bp, synthetic construct; identical to SEQ ID NO: 2498
  source 1..120: mol_type = other DNA

SEQ ID NO: 2503 - DNA, 120 bp, synthetic construct
  source 1..120: mol_type = other DNA
aaaaaatataaaacaccatacaaatataaaataaaacaattaattactaatattatcacgcacaataactatatatttcaaaaaccaaaaaactatcttataaatccaattaaaaaaaaa

SEQ ID NO: 2504 - DNA, 120 bp, synthetic construct
  source 1..120: mol_type = other DNA
gaaaagtataaaatattatataaatgtaaggtagagtaattaattgttagtattattacgtataatgattatgtattttagaggttaggaagttattttgtaaatttagttagaaaaggg

SEQ ID NO: 2505 - DNA, 120 bp, synthetic construct
  source 1..120: mol_type = other DNA
tccaaccctatcattaaaaaaaaaaaaataaatcctaattcttaaaaatactccttctaattcaaataatatattataacttcaattaaaacaaaataaactaatatatattactattat

SEQ ID NO: 2506 - DNA, 120 bp, synthetic construct
  source 1..120: mol_type = other DNA
tttagttttgttattagaaaagggagagtaagttttaatttttagaaatgttttttttaatttagataatatgttatagttttaattgagataaagtagattaatgtatattattattat

SEQ ID NO: 2507 - DNA, 120 bp, synthetic construct
  source 1..120: mol_type = other DNA
tccaaccctatcattaaaaaaaaaaaaataaatcctaattcttaaaaatactcctactaattcaattaatatattataacttcaattaaaacaaaataaactaatatatattactattat

SEQ ID NO: 2508 - DNA, 120 bp, synthetic construct
  source 1..120: mol_type = other DNA
tttagttttgttattagaaaagggagagtaagttttaatttttagaaatgtttttattaatttagttaatatgttatagttttaattgagataaagtagattaatgtatattattattat

SEQ ID NO: 2509 - DNA, 120 bp, synthetic construct; identical to SEQ ID NO: 2505
  source 1..120: mol_type = other DNA

SEQ ID NO: 2510 - DNA, 120 bp, synthetic construct; identical to SEQ ID NO: 2506
  source 1..120: mol_type = other DNA

SEQ ID NO: 2511 - DNA, 120 bp, synthetic construct; identical to SEQ ID NO: 2507
  source 1..120: mol_type = other DNA

SEQ ID NO: 2512 - DNA, 120 bp, synthetic construct; identical to SEQ ID NO: 2508
  source 1..120: mol_type = other DNA

SEQ ID NO: 2513 - DNA, 120 bp, synthetic construct
  source 1..120: mol_type = other DNA
ttaaaaaaaataattaacccttttaaaacattaaattatcccctaataataacattacatctctaaaaaacattttatatcctccaaaaaaaaaatctcattaaatcaaatatattaaaa

SEQ ID NO: 2514 - DNA, 120 bp, synthetic construct
  source 1..120: mol_type = other DNA
ttaggggaaataattagtttttttaggatattagattattttttagtggtgatattatatttttggggaatattttatattttttagaaaagggattttattaagttaagtgtgttaaag

SEQ ID NO: 2515 - DNA, 120 bp, synthetic construct
  source 1..120: mol_type = other DNA
ttaaaaaaaataattaacccttttaaaacattaaattatcccctaataataacattccatctctacaaaacattttatatcctccaaaaaaaaaatctcattaaatcaaatatattaaaa

SEQ ID NO: 2516 - DNA, 120 bp, synthetic construct
  source 1..120: mol_type = other DNA
ttaggggaaataattagtttttttaggatattagattattttttagtggtgatattttatttttgtggaatattttatattttttagaaaagggattttattaagttaagtgtgttaaag

SEQ ID NO: 2517 - DNA, 120 bp, synthetic construct; identical to SEQ ID NO: 2513
  source 1..120: mol_type = other DNA

SEQ ID NO: 2518 - DNA, 120 bp, synthetic construct; identical to SEQ ID NO: 2514
  source 1..120: mol_type = other DNA

SEQ ID NO: 2519 - DNA, 120 bp, synthetic construct
  source 1..120: mol_type = other DNA
ttaaaaaaaataattaacccttttaaaacattaaattatcccctaataataacattccatctctacgaaacattttatatcctccaaaaaaaaaatctcattaaatcaaatatattaaaa

SEQ ID NO: 2520 - DNA, 120 bp, synthetic construct
  source 1..120: mol_type = other DNA
ttaggggaaataattagtttttttaggatattagattattttttagtggtgatattttatttttgcggaatattttatattttttagaaaagggattttattaagttaagtgtgttaaag

SEQ ID NO: 2521 - DNA, 120 bp, synthetic construct
  source 1..120: mol_type = other DNA
caaaaaaaatctatacccttataaaactaaaaatctaataaaaaaaaataaataacaaacaaatccacaaataaaacaaaccacataacaaataataacaaatattacaataaaaattaa

SEQ ID NO: 2522 - DNA, 120 bp, synthetic construct
  source 1..120: mol_type = other DNA
tagaaaaggtttatgtttttatggagttgagagtttggtgaggggagatgagtaataaataaatttgtaggtaaaataaattatatggtaaatagtggtaggtgttataatgaaaattaa

SEQ ID NO: 2523 - DNA, 120 bp, synthetic construct
  source 1..120: mol_type = other DNA
caaaaaaaatctatacccttataaaactaaaaatctaataaaaaaaaataaataacaaaaatatccacaaataaaacaaaccacataacaaataataacaaatattacaataaaaattaa

SEQ ID NO: 2524 - DNA, 120 bp, synthetic construct
  source 1..120: mol_type = other DNA
tagaaaaggtttatgtttttatggagttgagagtttggtgaggggagatgagtaataaaaatatttgtaggtaaaataaattatatggtaaatagtggtaggtgttataatgaaaattaa

SEQ ID NO: 2525 - DNA, 120 bp, synthetic construct
  source 1..120: mol_type = other DNA
caaaaaaaatctatacccttataaaactaaaaatctaataaaaaaaaataaataacaaacaaatccgcaaataaaacaaaccacataacaaataataacaaatattacaataaaaattaa

SEQ ID NO: 2526 - DNA, 120 bp, synthetic construct
  source 1..120: mol_type = other DNA
tagaaaaggtttatgtttttatggagttgagagtttggtgaggggagatgagtaataaataaattcgtaggtaaaataaattatatggtaaatagtggtaggtgttataatgaaaattaa

SEQ ID NO: 2527 - DNA, 120 bp, synthetic construct
  source 1..120: mol_type = other DNA
caaaaaaaatctatacccttataaaactaaaaatctaataaaaaaaaataaataacaaaaatatccgcaaataaaacaaaccacataacaaataataacaaatattacaataaaaattaa

SEQ ID NO: 2528 - DNA, 120 bp, synthetic construct
  source 1..120: mol_type = other DNA
tagaaaaggtttatgtttttatggagttgagagtttggtgaggggagatgagtaataaaaatattcgtaggtaaaataaattatatggtaaatagtggtaggtgttataatgaaaattaa

SEQ ID NO: 2529 - DNA, 120 bp, synthetic construct
  source 1..120: mol_type = other DNA
aaaattccaaaattaataaaaaaaaatataataaaataaaataaaaccaatttaaaaaaccttcaacaaaatatacaaactaaatattcaaacaaaaatatttaaaatacctcaacctca

SEQ ID NO: 2530 - DNA, 120 bp, synthetic construct
  source 1..120: mol_type = other DNA
gagattttaaaattagtaaaaaaaaatataataaagtaaaataaagttaatttaaaaagtttttgatagaatatataaattggatatttaagtagaagtgtttgaaatgttttagtttta

SEQ ID NO: 2531 - DNA, 120 bp, synthetic construct
  source 1..120: mol_type = other DNA
aaaattccaaaattaataaaaaaaaatataataaaataaaataaaaccaatttaaaaaaacatcaacaaaatatacaaactaaatattcaaacaaaaatatttaaaatacctcaacctca

SEQ ID NO: 2532 - DNA, 120 bp, synthetic construct
  source 1..120: mol_type = other DNA
gagattttaaaattagtaaaaaaaaatataataaagtaaaataaagttaatttaaaaaggtattgatagaatatataaattggatatttaagtagaagtgtttgaaatgttttagtttta

SEQ ID NO: 2533 - DNA, 120 bp, synthetic construct
  source 1..120: mol_type = other DNA
aaaattccaaaattaataaaaaaaaatataataaaataaaataaaaccaatttaaaaaaccttcgacaaaatatacaaactaaatattcaaacaaaaatatttaaaatacctcaacctca

SEQ ID NO: 2534 - DNA, 120 bp, synthetic construct
  source 1..120: mol_type = other DNA
gagattttaaaattagtaaaaaaaaatataataaagtaaaataaagttaatttaaaaagttttcgatagaatatataaattggatatttaagtagaagtgtttgaaatgttttagtttta

SEQ ID NO: 2535 - DNA, 120 bp, synthetic construct
  source 1..120: mol_type = other DNA
aaaattccaaaattaataaaaaaaaatataataaaataaaataaaaccaatttaaaaaaacatcgacaaaatatacaaactaaatattcaaacaaaaatatttaaaatacctcaacctca

SEQ ID NO: 2536 - DNA, 120 bp, synthetic construct
  source 1..120: mol_type = other DNA
gagattttaaaattagtaaaaaaaaatataataaagtaaaataaagttaatttaaaaaggtatcgatagaatatataaattggatatttaagtagaagtgtttgaaatgttttagtttta

SEQ ID NO: 2537 - DNA, 120 bp, synthetic construct
  source 1..120: mol_type = other DNA
aaaccaaaaataattcttaaaaataatcaaaaaaattaataaaattcctaccacactaattaaaaaaaaaaaaaaaaatcataaataaccaatatttataaaaaaaaaatataacatcac

SEQ ID NO: 2538 - DNA, 120 bp, synthetic construct
  source 1..120: mol_type = other DNA
aaattaaaggtggtttttaaagatagttaaaaaagttgataaaatttttgttatattgattaggaaaaaagagagaagttatgaatgattaatatttgtgaaagagaaatgtgatattat

SEQ ID NO: 2539 - DNA, 120 bp, synthetic construct
  source 1..120: mol_type = other DNA
aaaccaaaaataattcttaaaaataatcaaaaaaattaataaaattcctaccacactaaattaaaaaaaaaaaaaaaatcataaataaccaatatttataaaaaaaaaatataacatcac

SEQ ID NO: 2540 - DNA, 120 bp, synthetic construct
  source 1..120: mol_type = other DNA
aaattaaaggtggtttttaaagatagttaaaaaagttgataaaatttttgttatattgaattggaaaaaagagagaagttatgaatgattaatatttgtgaaagagaaatgtgatattat

SEQ ID NO: 2541 - DNA, 120 bp, synthetic construct; identical to SEQ ID NO: 2537
  source 1..120: mol_type = other DNA

SEQ ID NO: 2542 - DNA, 120 bp, synthetic construct; identical to SEQ ID NO: 2538
  source 1..120: mol_type = other DNA

SEQ ID NO: 2543 - DNA, 120 bp, synthetic construct; identical to SEQ ID NO: 2539
  source 1..120: mol_type = other DNA

SEQ ID NO: 2544 - DNA, 120 bp, synthetic construct; identical to SEQ ID NO: 2540
  source 1..120: mol_type = other DNA

SEQ ID NO: 2545 - DNA, 120 bp, synthetic construct
  source 1..120: mol_type = other DNA
taaaataaaaataaaaaaaaaactattaataattctaccaatacaacatataaatacaacaatccaaaaaacacaatccccctttcatcataaaaaaaaaataaaaaataaaatactttt

SEQ ID NO: 2546 - DNA, 120 bp, synthetic construct
  source 1..120: mol_type = other DNA
tggggtaagagtaaaaggggaattattaatagttttgttagtataatatgtaaatgtaatagtttaggaagtatagttttttttttattatgaagaaagaatggaaggtggagtgttttt

SEQ ID NO: 2547 - DNA, 120 bp, synthetic construct
  source 1..120: mol_type = other DNA
taaaataaaaataaaaaaaaaactattaataattctaccaatacaacatataaataaaacaatcaaaaaaacacaatccccctttcatcataaaaaaaaaataaaaaataaaatactttt

SEQ ID NO: 2548 - DNA, 120 bp, synthetic construct
  source 1..120: mol_type = other DNA
tggggtaagagtaaaaggggaattattaatagttttgttagtataatatgtaaatgaaatagttaaggaagtatagttttttttttattatgaagaaagaatggaaggtggagtgttttt

SEQ ID NO: 2549 - DNA, 120 bp, synthetic construct; identical to SEQ ID NO: 2545
  source 1..120: mol_type = other DNA

SEQ ID NO: 2550 - DNA, 120 bp, synthetic construct; identical to SEQ ID NO: 2546
  source 1..120: mol_type = other DNA

SEQ ID NO: 2551 - DNA, 120 bp, synthetic construct; identical to SEQ ID NO: 2547
  source 1..120: mol_type = other DNA

SEQ ID NO: 2552 - DNA, 120 bp, synthetic construct; identical to SEQ ID NO: 2548
  source 1..120: mol_type = other DNA

SEQ ID NO: 2553 - DNA, 120 bp, synthetic construct
  source 1..120: mol_type = other DNA
taattacattatatacctttataaaacacaatatatacattaacatacaaatttaaaatctacaaatcaacaatacaaattaaaaaaaattacccaaaataattttaaaaaaaatattat

SEQ ID NO: 2554 - DNA, 120 bp, synthetic construct
  source 1..120: mol_type = other DNA
tgattgtattgtgtatttttatgggatatagtatatgtattaatatatgaatttaagatttgtaaattaataatataaattagagaagattgtttaggatgattttgaggagaatgttgt

SEQ ID NO: 2555 - DNA, 120 bp, synthetic construct
  source 1..120: mol_type = other DNA
taattacattatatacctttataaaacacaatatatacattaacatacaaatttaatatctacacatcaacaatacaaattaaaaaaaattacccaaaataattttaaaaaaaatattat

SEQ ID NO: 2556 - DNA, 120 bp, synthetic construct
  source 1..120: mol_type = other DNA
tgattgtattgtgtatttttatgggatatagtatatgtattaatatatgaatttaatatttgtatattaataatataaattagagaagattgtttaggatgattttgaggagaatgttgt

SEQ ID NO: 2557 - DNA, 120 bp, synthetic construct
  source 1..120: mol_type = other DNA
taattacattatatacctttataaaacacaatatatacattaacatacgaatttaaaatctacaaatcaacaatacaaattaaaaaaaattacccaaaataattttaaaaaaaatattat

SEQ ID NO: 2558 - DNA, 120 bp, synthetic construct
  source 1..120: mol_type = other DNA
tgattgtattgtgtatttttatgggatatagtatatgtattaatatacgaatttaagatttgtaaattaataatataaattagagaagattgtttaggatgattttgaggagaatgttgt

SEQ ID NO: 2559 - DNA, 120 bp, synthetic construct
  source 1..120: mol_type = other DNA
taattacattatatacctttataaaacacaatatatacattaacatacgaatttaatatctacacatcaacaatacaaattaaaaaaaattacccaaaataattttaaaaaaaatattat

SEQ ID NO: 2560 - DNA, 120 bp, synthetic construct
  source 1..120: mol_type = other DNA
tgattgtattgtgtatttttatgggatatagtatatgtattaatatacgaatttaatatttgtatattaataatataaattagagaagattgtttaggatgattttgaggagaatgttgt

SEQ ID NO: 2561 - DNA, 120 bp, synthetic construct
  source 1..120: mol_type = other DNA
aaaaaatcaataaaaaataataaaattcaaaaacaaattaattcactttttcctacaaactataaatataaaaaaaaattctataaataaaaataataactaaaataaaaaatacaataa

SEQ ID NO: 2562 - DNA, 120 bp, synthetic construct
  source 1..120: mol_type = other DNA
gaagaattaatgaaagataataaaatttaaaagtaaattaatttatttttttttgtggattgtgagtgtgaagaaaaattttgtaggtaaggatggtagttagaatggaaagtatagtaa

SEQ ID NO: 2563 - DNA, 120 bp, synthetic construct
  source 1..120: mol_type = other DNA
aaaaaatcaataaaaaataataaaattcaaaaacaaattaattcactttttcctactaactataactataaaaaaaaattctataaataaaaataataactaaaataaaaaatacaataa

SEQ ID NO: 2564 - DNA, 120 bp, synthetic construct
  source 1..120: mol_type = other DNA
gaagaattaatgaaagataataaaatttaaaagtaaattaatttatttttttttgttgattgtgattgtgaagaaaaattttgtaggtaaggatggtagttagaatggaaagtatagtaa

SEQ ID NO: 2565 - DNA, 120 bp, synthetic construct
  source 1..120: mol_type = other DNA
aaaaaatcaataaaaaataataaaattcaaaaacaaattaattcactttttcctacgaactataaatataaaaaaaaattctataaataaaaataataactaaaataaaaaatacaataa

SEQ ID NO: 2566 - DNA, 120 bp, synthetic construct
  source 1..120: mol_type = other DNA
gaagaattaatgaaagataataaaatttaaaagtaaattaatttatttttttttgcggattgtgagtgtgaagaaaaattttgtaggtaaggatggtagttagaatggaaagtatagtaa

SEQ ID NO: 2567 - DNA, 120 bp, synthetic construct; identical to SEQ ID NO: 2563
  source 1..120: mol_type = other DNA

SEQ ID NO: 2568 - DNA, 120 bp, synthetic construct; identical to SEQ ID NO: 2564
  source 1..120: mol_type = other DNA

SEQ ID NO: 2569 - DNA, 120 bp, synthetic construct
  source 1..120: mol_type = other DNA
aaaatattatataaataaaatcatactattattaaaaaaaaaacttatttaaactcttatacaaaacaataaaaccaaacttaattcactactccattaaaattttaccctataaaaaaa

SEQ ID NO: 2570 - DNA, 120 bp, synthetic construct
  source 1..120: mol_type = other DNA
agaatgttatataaatggaattatattgttgttaaagaaaaaatttatttaaatttttgtgtaagatagtaagattagatttaatttattattttattgaggttttgttttatgggaggg

SEQ ID NO: 2571 - DNA, 120 bp, synthetic construct
  source 1..120: mol_type = other DNA
aaaatattatataaataaaatcatactattattaaaaaaaaaacttatttaaactcttattaaaaacaataaaaccaaacttaattcactactccattaaaattttaccctataaaaaaa

SEQ ID NO: 2572 - DNA, 120 bp, synthetic construct
  source 1..120: mol_type = other DNA
agaatgttatataaatggaattatattgttgttaaagaaaaaatttatttaaatttttgttaaagatagtaagattagatttaatttattattttattgaggttttgttttatgggaggg

SEQ ID NO: 2573 - DNA, 120 bp, synthetic construct; identical to SEQ ID NO: 2569
  source 1..120: mol_type = other DNA

SEQ ID NO: 2574 - DNA, 120 bp, synthetic construct; identical to SEQ ID NO: 2570
  source 1..120: mol_type = other DNA

SEQ ID NO: 2575 - DNA, 120 bp, synthetic construct; identical to SEQ ID NO: 2571
  source 1..120: mol_type = other DNA

SEQ ID NO: 2576 - DNA, 120 bp, synthetic construct; identical to SEQ ID NO: 2572
  source 1..120: mol_type = other DNA

SEQ ID NO: 2577 - DNA, 120 bp, synthetic construct
  source 1..120: mol_type = other DNA
aacaaataacctataaaaacctaaatcctcctaaaataattttaaactttctctacatccacaaaaatacatttccctacaaaaaaaataatacatacttaaatttttcaaaaacccaaa

SEQ ID NO: 2578 - DNA, 120 bp, synthetic construct
  source 1..120: mol_type = other DNA
aataggtggtttgtgggagtttagatttttttaaaatggttttgagttttttttgtatttatagaggtgtatttttttgtaggaaggatgatatatgtttagattttttagaggtttaaa

SEQ ID NO: 2579 - DNA, 120 bp, synthetic construct
  source 1..120: mol_type = other DNA
aacaaataacctataaaaacctaaatcctcctaaaataattttaaactttctctacatcccaaaaaatacatttccctacaaaaaaaataatacatacttaaatttttcaaaaacccaaa

SEQ ID NO: 2580 - DNA, 120 bp, synthetic construct
  source 1..120: mol_type = other DNA
aataggtggtttgtgggagtttagatttttttaaaatggttttgagttttttttgtattttaagaggtgtatttttttgtaggaaggatgatatatgtttagattttttagaggtttaaa

SEQ ID NO: 2581 - DNA, 120 bp, synthetic construct; identical to SEQ ID NO: 2577
  source 1..120: mol_type = other DNA

SEQ ID NO: 2582 - DNA, 120 bp, synthetic construct; identical to SEQ ID NO: 2578
  source 1..120: mol_type = other DNA

SEQ ID NO: 2583 - DNA, 120 bp, synthetic construct; identical to SEQ ID NO: 2579
  source 1..120: mol_type = other DNA

SEQ ID NO: 2584 - DNA, 120 bp, synthetic construct; identical to SEQ ID NO: 2580
  source 1..120: mol_type = other DNA

SEQ ID NO: 2585 - DNA, 120 bp, synthetic construct
  source 1..120: mol_type = other DNA
aacaaaactactaacaactaatcccaattttactccacctaaacataatataataaaaacaaacctttactataaaaattataaaacaatcaaaaaatttcctctttccaaaaatatcct

SEQ ID NO: 2586 - DNA, 120 bp, synthetic construct
  source 1..120: mol_type = other DNA
agtaaaattgttgatggttagttttggttttgttttgtttagatatggtgtggtaaaggtaaatttttgttatgggagttataaggtaattagaaggttttttttttttaaaaatgtttt

SEQ ID NO: 2587 - DNA, 120 bp, synthetic construct
  source 1..120: mol_type = other DNA
aacaaaactactaacaactaatcccaattttactccacctaaacataatataataaaaactcacctttactataaaaattataaaacaatcaaaaaatttcctctttccaaaaatatcct

SEQ ID NO: 2588 - DNA, 120 bp, synthetic construct
  source 1..120: mol_type = other DNA
agtaaaattgttgatggttagttttggttttgttttgtttagatatggtgtggtaaaggtttatttttgttatgggagttataaggtaattagaaggttttttttttttaaaaatgtttt

SEQ ID NO: 2589 - DNA, 120 bp, synthetic construct
  source 1..120: mol_type = other DNA
aacaaaactactaacgactaatcccgattttactccgcctaaacataatataataaaaacaaacctttactataaaaattataaaacaatcaaaaaatttcctctttccaaaaatatcct

SEQ ID NO: 2590 - DNA, 120 bp, synthetic construct
  source 1..120: mol_type = other DNA
agtaaaattgttgacggttagtttcggttttgtttcgtttagatatggtgtggtaaaggtaaatttttgttatgggagttataaggtaattagaaggttttttttttttaaaaatgtttt

SEQ ID NO: 2591 - DNA, 120 bp, synthetic construct
  source 1..120: mol_type = other DNA
aacaaaactactaacgactaatcccgattttactccgcctaaacataatataataaaaactcacctttactataaaaattataaaacaatcaaaaaatttcctctttccaaaaatatcct

SEQ ID NO: 2592 - DNA, 120 bp, synthetic construct
  source 1..120: mol_type = other DNA
agtaaaattgttgacggttagtttcggttttgtttcgtttagatatggtgtggtaaaggtttatttttgttatgggagttataaggtaattagaaggttttttttttttaaaaatgtttt

SEQ ID NO: 2593 - DNA, 120 bp, synthetic construct
  source 1..120: mol_type = other DNA
aacacacttcctactttatccactaaatatttaaaatatataataatttaaaatcattaaaaaaattacaaataattaataaacacctaaatttaacaaatattttacaacaataaaaaa

SEQ ID NO: 2594 - DNA, 120 bp, synthetic construct
  source 1..120: mol_type = other DNA
agtatattttttgttttatttattaggtatttagggtatataatgatttggggttattaaagaaattgtagatgattagtaaatatttgaatttagtaaatgttttataataataaagag

SEQ ID NO: 2595 - DNA, 120 bp, synthetic construct
  source 1..120: mol_type = other DNA
aacacacttcctactttatccactaaatatttaaaatatataataatttaaaatcattaactaaattacaaataattaataaacacctaaatttaacaaatattttacaacaataaaaaa

SEQ ID NO: 2596 - DNA, 120 bp, synthetic construct
  source 1..120: mol_type = other DNA
agtatattttttgttttatttattaggtatttagggtatataatgatttggggttattaattaaattgtagatgattagtaaatatttgaatttagtaaatgttttataataataaagag

SEQ ID NO: 2597 - DNA, 120 bp, synthetic construct; identical to SEQ ID NO: 2593
  source 1..120: mol_type = other DNA

SEQ ID NO: 2598 - DNA, 120 bp, synthetic construct; identical to SEQ ID NO: 2594
  source 1..120: mol_type = other DNA

SEQ ID NO: 2599 - DNA, 120 bp, synthetic construct; identical to SEQ ID NO: 2595
  source 1..120: mol_type = other DNA

SEQ ID NO: 2600 - DNA, 120 bp, synthetic construct; identical to SEQ ID NO: 2596
  source 1..120: mol_type = other DNA

SEQ ID NO: 2601 - DNA, 120 bp, synthetic construct
  source 1..120: mol_type = other DNA
aaactctactattctaaaaaaaacaccaaacctttccaaaatccaatctaaaactatcttaaaaaatctactatcaaaacatactccttaaaaaacaaatattaacaaaaaaaaaaaaaa

SEQ ID NO: 2602 - DNA, 120 bp, synthetic construct
  source 1..120: mol_type = other DNA
aagttttgttgttttggaagagatgttaggtttttttagaatttggtttaaggttgttttaaaggatttgttgttaaggtgtattttttagggagtaggtgttggtaaagggaggagaga

SEQ ID NO: 2603 - DNA, 120 bp, synthetic construct
  source 1..120: mol_type = other DNA
aaactctactattctaaaaaaaacaccaaacctttccaaaatccaatctaaaactatcttccaaaatctactatcaaaacatactccttaaaaaacaaatattaacaaaaaaaaaaaaaa

SEQ ID NO: 2604 - DNA, 120 bp, synthetic construct
  source 1..120: mol_type = other DNA
aagttttgttgttttggaagagatgttaggtttttttagaatttggtttaaggttgttttttaggatttgttgttaaggtgtattttttagggagtaggtgttggtaaagggaggagaga

SEQ ID NO: 2605 - DNA, 120 bp, synthetic construct
  source 1..120: mol_type = other DNA
aaactctactattctaaaaaaaacgccaaacctttccaaaatccgatctaaaactatcttaaaaaatctactatcaaaacgtactccttaaaaaacaaatattaacaaaaaaaaaaaaaa

SEQ ID NO: 2606 - DNA, 120 bp, synthetic construct
  source 1..120: mol_type = other DNA
aagttttgttgttttggaagagacgttaggtttttttagaattcggtttaaggttgttttaaaggatttgttgttaaggcgtattttttagggagtaggtgttggtaaagggaggagaga

SEQ ID NO: 2607 - DNA, 120 bp, synthetic construct
  source 1..120: mol_type = other DNA
aaactctactattctaaaaaaaacgccaaacctttccaaaatccgatctaaaactatcttccaaaatctactatcaaaacgtactccttaaaaaacaaatattaacaaaaaaaaaaaaaa

SEQ ID NO: 2608 - DNA, 120 bp, synthetic construct
  source 1..120: mol_type = other DNA
aagttttgttgttttggaagagacgttaggtttttttagaattcggtttaaggttgttttttaggatttgttgttaaggcgtattttttagggagtaggtgttggtaaagggaggagaga

SEQ ID NO: 2609 - DNA, 120 bp, synthetic construct
  source 1..120: mol_type = other DNA
cacaaatctaatcaaatcatttttctatttacaaatttcaataactacccattatcctaaaaataaatcaatacttctcaacaaaccttaaaaattaacaaacataatccaactataatt

SEQ ID NO: 2610 - DNA, 120 bp, synthetic construct
  source 1..120: mol_type = other DNA
tataaatttgattaggttatttttttgtttataaattttagtgattgtttattgttttaaggataaattaatattttttagtaggttttaagagttgataggtatgatttagttatgatt

SEQ ID NO: 2611 - DNA, 120 bp, synthetic construct
  source 1..120: mol_type = other DNA
cacaaatctaatcaaatcatttttctatttacaaatttcaataactacccattatcctaattataaatcaatacttctcaacaaaccttaaaaattaacaaacataatccaactataatt

SEQ ID NO: 2612 - DNA, 120 bp, synthetic construct
  source 1..120: mol_type = other DNA
tataaatttgattaggttatttttttgtttataaattttagtgattgtttattgttttaattataaattaatattttttagtaggttttaagagttgataggtatgatttagttatgatt

SEQ ID NO: 2613 - DNA, 120 bp, synthetic construct; identical to SEQ ID NO: 2609
  source 1..120: mol_type = other DNA

SEQ ID NO: 2614 - DNA, 120 bp, synthetic construct; identical to SEQ ID NO: 2610
  source 1..120: mol_type = other DNA

SEQ ID NO: 2615 - DNA, 120 bp, synthetic construct; identical to SEQ ID NO: 2611
  source 1..120: mol_type = other DNA

SEQ ID NO: 2616 - DNA, 120 bp, synthetic construct; identical to SEQ ID NO: 2612
  source 1..120: mol_type = other DNA

SEQ ID NO: 2617 - DNA, 120 bp, synthetic construct
  source 1..120: mol_type = other DNA
acaaacttcacacaaatcaataaaaaaacttaaaactatcctctctaataaaaacttcaaaaaatccacctctacactacaatctaataaacacccaaaatcctaatatatcttcttatt

SEQ ID NO: 2618 - DNA, 120 bp, synthetic construct
  source 1..120: mol_type = other DNA
gtagattttatataagttaatgagggagtttggagttgttttttttggtgaggattttagagagtttatttttgtattgtagtttgatgagtatttagaattttgatgtgtttttttgtt

SEQ ID NO: 2619 - DNA, 120 bp, synthetic construct
  source 1..120: mol_type = other DNA
acaaacttcacacaaatcaataaaaaaacttaaaactatcctctctaataaaaacttaaaaaaaaccacctctacactacaatctaataaacacccaaaatcctaatatatcttcttatt

SEQ ID NO: 2620 - DNA, 120 bp, synthetic construct
  source 1..120: mol_type = other DNA
gtagattttatataagttaatgagggagtttggagttgttttttttggtgaggatttaagagaggttatttttgtattgtagtttgatgagtatttagaattttgatgtgtttttttgtt

SEQ ID NO: 2621 - DNA, 120 bp, synthetic construct; identical to SEQ ID NO: 2617
  source 1..120: mol_type = other DNA

SEQ ID NO: 2622 - DNA, 120 bp, synthetic construct; identical to SEQ ID NO: 2618
  source 1..120: mol_type = other DNA

SEQ ID NO: 2623 - DNA, 120 bp, synthetic construct; identical to SEQ ID NO: 2619
  source 1..120: mol_type = other DNA

SEQ ID NO: 2624 - DNA, 120 bp, synthetic construct; identical to SEQ ID NO: 2620
  source 1..120: mol_type = other DNA

SEQ ID NO: 2625 - DNA, 120 bp, synthetic construct
  source 1..120: mol_type = other DNA
attcatttattcaaaaaatttatatttaatacttattctataaaaacaattctcccaaattcaaaaaaaattaaaaatatataaaactaaataacacactcaaaaaacttaaaatctaat

SEQ ID NO: 2626 - DNA, 120 bp, synthetic construct
  source 1..120: mol_type = other DNA
atttgtttatttaagaagtttatatttggtgtttattttgtggaagtagtttttttaaatttaagaggaattaaagatgtataggattaagtaatatatttaaaggatttaagatttagt

SEQ ID NO: 2627 - DNA, 120 bp, synthetic construct
  source 1..120: mol_type = other DNA
attcatttattcaaaaaatttatatttaatacttattctataaaaacaattctcccaatttccaaaaaaattaaaaatatataaaactaaataacacactcaaaaaacttaaaatctaat

SEQ ID NO: 2628 - DNA, 120 bp, synthetic construct
  source 1..120: mol_type = other DNA
atttgtttatttaagaagtttatatttggtgtttattttgtggaagtagtttttttaatttttagaggaattaaagatgtataggattaagtaatatatttaaaggatttaagatttagt

SEQ ID NO: 2629 - DNA, 120 bp, synthetic construct
  source 1..120: mol_type = other DNA
attcgtttattcaaaaaatttatatttaatacttattctataaaaacaattctcccaaattcaaaaaaaattaaaaatatataaaactaaataacacactcaaaaaacttaaaatctaat

SEQ ID NO: 2630 - DNA, 120 bp, synthetic construct
  source 1..120: mol_type = other DNA
attcgtttatttaagaagtttatatttggtgtttattttgtggaagtagtttttttaaatttaagaggaattaaagatgtataggattaagtaatatatttaaaggatttaagatttagt

SEQ ID NO: 2631 - DNA, 120 bp, synthetic construct
  source 1..120: mol_type = other DNA
attcgtttattcaaaaaatttatatttaatacttattctataaaaacaattctcccaatttccaaaaaaattaaaaatatataaaactaaataacacactcaaaaaacttaaaatctaat

SEQ ID NO: 2632 - DNA, 120 bp, synthetic construct
  source 1..120: mol_type = other DNA
attcgtttatttaagaagtttatatttggtgtttattttgtggaagtagtttttttaatttttagaggaattaaagatgtataggattaagtaatatatttaaaggatttaagatttagt

SEQ ID NO: 2633 - DNA, 120 bp, synthetic construct
  source 1..120: mol_type = other DNA
acaaaacctaaactccaaaaaaatttaaaaaataattttcaactttctaatataaaaaataatcaaaccaatccacaatatctactataataccttccataaaattattataaaaataaa

SEQ ID NO: 2634 - DNA, 120 bp, synthetic construct
  source 1..120: mol_type = other DNA
gtaaagtttgagttttaaaggaatttgggaaatagtttttagttttttagtatggaggatgattaagttaatttataatatttgttataatgttttttatgagattgttgtgaagatgaa

SEQ ID NO: 2635 - DNA, 120 bp, synthetic construct
  source 1..120: mol_type = other DNA
acaaaacctaaactccaaaaaaatttaaaaaataattttcaactttctaatataaaaattaaacaaaccaatccacaatatctactataataccttccataaaattattataaaaataaa

SEQ ID NO: 2636 - DNA, 120 bp, synthetic construct
  source 1..120: mol_type = other DNA
gtaaagtttgagttttaaaggaatttgggaaatagtttttagttttttagtatggaggttgagtaagttaatttataatatttgttataatgttttttatgagattgttgtgaagatgaa

SEQ ID NO: 2637 - DNA, 120 bp, synthetic construct; identical to SEQ ID NO: 2633
  source 1..120: mol_type = other DNA

SEQ ID NO: 2638 - DNA, 120 bp, synthetic construct; identical to SEQ ID NO: 2634
  source 1..120: mol_type = other DNA

SEQ ID NO: 2639 - DNA, 120 bp, synthetic construct; identical to SEQ ID NO: 2635
  source 1..120: mol_type = other DNA

SEQ ID NO: 2640 - DNA, 120 bp, synthetic construct; identical to SEQ ID NO: 2636
  source 1..120: mol_type = other DNA

SEQ ID NO: 2641 - DNA, 120 bp, synthetic construct
  source 1..120: mol_type = other DNA
ttctattaacatcacccccctttaaaatttttaaaaaataatattaaatatctactaataaaaaatcaaactaaaacactaatttcttaacataatatatttatttcttataaaataaaa

SEQ ID NO: 2642 - DNA, 120 bp, synthetic construct
  source 1..120: mol_type = other DNA
ttttgttaatattgtttttttttaggatttttaagaaataatattgaatatttattaatgaggagttaaattaaaatattaattttttgatatagtgtatttgttttttataaaatgaaa

SEQ ID NO: 2643 - DNA, 120 bp, synthetic construct
  source 1..120: mol_type = other DNA
ttctattaacatcacccccctttaaaatttttaaaaaataatattaaatatctactaaaaaataatcaaactaaaacactaatttcttaacataatatatttatttcttataaaataaaa

SEQ ID NO: 2644 - DNA, 120 bp, synthetic construct
  source 1..120: mol_type = other DNA
ttttgttaatattgtttttttttaggatttttaagaaataatattgaatatttattaaggagtagttaaattaaaatattaattttttgatatagtgtatttgttttttataaaatgaaa

SEQ ID NO: 2645 - DNA, 120 bp, synthetic construct
  source 1..120: mol_type = other DNA
ttctattaacatcgcccccctttaaaatttttaaaaaataatattaaatatctactaataaaaaatcaaactaaaacactaatttcttaacataatatatttatttcttataaaataaaa

SEQ ID NO: 2646 - DNA, 120 bp, synthetic construct
  source 1..120: mol_type = other DNA
ttttgttaatatcgtttttttttaggatttttaagaaataatattgaatatttattaatgaggagttaaattaaaatattaattttttgatatagtgtatttgttttttataaaatgaaa

SEQ ID NO: 2647 - DNA, 120 bp, synthetic construct
  source 1..120: mol_type = other DNA
ttctattaacatcgcccccctttaaaatttttaaaaaataatattaaatatctactaaaaaataatcaaactaaaacactaatttcttaacataatatatttatttcttataaaataaaa

SEQ ID NO: 2648 - DNA, 120 bp, synthetic construct
  source 1..120: mol_type = other DNA
ttttgttaatatcgtttttttttaggatttttaagaaataatattgaatatttattaaggagtagttaaattaaaatattaattttttgatatagtgtatttgttttttataaaatgaaa

SEQ ID NO: 2649 - DNA, 120 bp, synthetic construct
  source 1..120: mol_type = other DNA
acttacattctcctaaaaatccctccaacttcaacccatcacctaatctcaaatccaataccatataattaaaaattttattaaaacaacaccctacctctaatatatcaaaatcattat

SEQ ID NO: 2650 - DNA, 120 bp, synthetic construct
  source 1..120: mol_type = other DNA
atttatatttttttaaagatttttttagttttagtttattatttagttttaagtttaatgttatatgattgaggattttgttaaggtagtattttgtttttggtgtattaaaattattat

SEQ ID NO: 2651 - DNA, 120 bp, synthetic construct
  source 1..120: mol_type = other DNA
acttacattctcctaaaaatccctccaacttcaacccatcacctaatctcaaatccaaaaccctataattaaaaattttattaaaacaacaccctacctctaatatatcaaaatcattat

SEQ ID NO: 2652 - DNA, 120 bp, synthetic construct
  source 1..120: mol_type = other DNA
atttatatttttttaaagatttttttagttttagtttattatttagttttaagtttaaagttttatgattgaggattttgttaaggtagtattttgtttttggtgtattaaaattattat

SEQ ID NO: 2653 - DNA, 120 bp, synthetic construct; identical to SEQ ID NO: 2649
  source 1..120: mol_type = other DNA

SEQ ID NO: 2654 - DNA, 120 bp, synthetic construct; identical to SEQ ID NO: 2650
  source 1..120: mol_type = other DNA

SEQ ID NO: 2655 - DNA, 120 bp, synthetic construct; identical to SEQ ID NO: 2651
  source 1..120: mol_type = other DNA

SEQ ID NO: 2656 - DNA, 120 bp, synthetic construct; identical to SEQ ID NO: 2652
  source 1..120: mol_type = other DNA

SEQ ID NO: 2657 - DNA, 120 bp, synthetic construct
  source 1..120: mol_type = other DNA
ccttaaaaacaaaaacccaaaaaataaaaccacccttcaaacctcctaatattaaaataaccacctacctctctaaataaaaacttaatcccaaaaaatttaacaaaaacaaaaaataaa

SEQ ID NO: 2658 - DNA, 120 bp, synthetic construct
  source 1..120: mol_type = other DNA
ttttggaggtaaaagtttagagaataaaattattttttaggttttttggtattgggatggttatttgtttttttgggtagaagtttagttttagggagtttggtgaggatagaggatgag

SEQ ID NO: 2659 - DNA, 120 bp, synthetic construct
  source 1..120: mol_type = other DNA
ccttaaaaacaaaaacccaaaaaataaaaccacccttcaaacctcctaatattaaaatacccccctacctctctaaataaaaacttaatcccaaaaaatttaacaaaaacaaaaaataaa

SEQ ID NO: 2660 - DNA, 120 bp, synthetic construct
  source 1..120: mol_type = other DNA
ttttggaggtaaaagtttagagaataaaattattttttaggttttttggtattgggatgtttttttgtttttttgggtagaagtttagttttagggagtttggtgaggatagaggatgag

SEQ ID NO: 2661 - DNA, 120 bp, synthetic construct
  source 1..120: mol_type = other DNA
ccttaaaaacaaaaacccaaaaaataaaaccacccttcaaacctcctaatattaaaataaccacctacctctctaaataaaaacttaatcccaaaaaatttaacgaaaacaaaaaataaa

SEQ ID NO: 2662 - DNA, 120 bp, synthetic construct
  source 1..120: mol_type = other DNA
ttttggaggtaaaagtttagagaataaaattattttttaggttttttggtattgggatggttatttgtttttttgggtagaagtttagttttagggagtttggcgaggatagaggatgag

SEQ ID NO: 2663 - DNA, 120 bp, synthetic construct
  source 1..120: mol_type = other DNA
ccttaaaaacaaaaacccaaaaaataaaaccacccttcaaacctcctaatattaaaatacccccctacctctctaaataaaaacttaatcccaaaaaatttaacgaaaacaaaaaataaa

SEQ ID NO: 2664 - DNA, 120 bp, synthetic construct
  source 1..120: mol_type = other DNA
ttttggaggtaaaagtttagagaataaaattattttttaggttttttggtattgggatgtttttttgtttttttgggtagaagtttagttttagggagtttggcgaggatagaggatgag

SEQ ID NO: 2665 - DNA, 120 bp, synthetic construct
  source 1..120: mol_type = other DNA
tatcttctttactactaaaaaattctctatttcttaccaccacaattaaaaataaaaaattaaccaattttaattaaactaatattctttaaatttatatttaaaattctctatttataa

SEQ ID NO: 2666 - DNA, 120 bp, synthetic construct
  source 1..120: mol_type = other DNA
tgttttttttgttattagggagttttttgttttttattattatagttggaagtggaaggttagttaattttgattggattggtgttttttaaatttgtgtttggagttttttatttgtga

SEQ ID NO: 2667 - DNA, 120 bp, synthetic construct
  source 1..120: mol_type = other DNA
tatcttctttactactaaaaaattctctatttcttaccaccacaattaaaaataaaaatttaaacaattttaattaaactaatattctttaaatttatatttaaaattctctatttataa

SEQ ID NO: 2668 - DNA, 120 bp, synthetic construct
  source 1..120: mol_type = other DNA
tgttttttttgttattagggagttttttgttttttattattatagttggaagtggaagtttagataattttgattggattggtgttttttaaatttgtgtttggagttttttatttgtga

SEQ ID NO: 2669 - DNA, 120 bp, synthetic construct; identical to SEQ ID NO: 2665
  source 1..120: mol_type = other DNA

SEQ ID NO: 2670 - DNA, 120 bp, synthetic construct; identical to SEQ ID NO: 2666
  source 1..120: mol_type = other DNA

SEQ ID NO: 2671 - DNA, 120 bp, synthetic construct; identical to SEQ ID NO: 2667
  source 1..120: mol_type = other DNA

SEQ ID NO: 2672 - DNA, 120 bp, synthetic construct; identical to SEQ ID NO: 2668
  source 1..120: mol_type = other DNA

SEQ ID NO: 2673 - DNA, 120 bp, synthetic construct
  source 1..120: mol_type = other DNA
ttcacattaaatacaaataacttttttaataaaaatcaaatatataaaccaaatcccacatataaatcactttaatataaaacaaaaacaacatctacaaactaaaaaactaaatcaaaa

SEQ ID NO: 2674 - DNA, 120 bp, synthetic construct
  source 1..120: mol_type = other DNA
tttatattgagtatgagtggtttttttagtggaagttaagtgtataggttaagttttatatgtgggttattttgatgtaaaataaagataatatttatagattgaagagttgagttagaa

SEQ ID NO: 2675 - DNA, 120 bp, synthetic construct
  source 1..120: mol_type = other DNA
ttcacattaaatacaaataacttttttaataaaaatcaaatatataaaccaaatcccaaatatcaatcactttaatataaaacaaaaacaacatctacaaactaaaaaactaaatcaaaa

SEQ ID NO: 2676 - DNA, 120 bp, synthetic construct
  source 1..120: mol_type = other DNA
tttatattgagtatgagtggtttttttagtggaagttaagtgtataggttaagttttaaatgttggttattttgatgtaaaataaagataatatttatagattgaagagttgagttagaa

SEQ ID NO: 2677 - DNA, 120 bp, synthetic construct
  source 1..120: mol_type = other DNA
ttcacattaaatacgaataacttttttaataaaaatcaaatatataaaccaaatcccacatataaatcactttaatataaaacaaaaacaacatctacaaactaaaaaactaaatcaaaa

SEQ ID NO: 2678 - DNA, 120 bp, synthetic construct
  source 1..120: mol_type = other DNA
tttatattgagtacgagtggtttttttagtggaagttaagtgtataggttaagttttatatgtgggttattttgatgtaaaataaagataatatttatagattgaagagttgagttagaa

SEQ ID NO: 2679 - DNA, 120 bp, synthetic construct
  source 1..120: mol_type = other DNA
ttcacattaaatacgaataacttttttaataaaaatcaaatatataaaccaaatcccaaatatcgatcactttaatataaaacaaaaacaacatctacaaactaaaaaactaaatcaaaa

SEQ ID NO: 2680 - DNA, 120 bp, synthetic construct
  source 1..120: mol_type = other DNA
tttatattgagtacgagtggtttttttagtggaagttaagtgtataggttaagttttaaatgtcggttattttgatgtaaaataaagataatatttatagattgaagagttgagttagaa

SEQ ID NO: 2681 - DNA, 120 bp, synthetic construct
  source 1..120: mol_type = other DNA
taaacttaatactaaaaaaacaaataaatacaacactaaaccttcactaaatcataaatttctactcataatttaataaaaacactttaacattctattaatactacaacaaaacaatct

SEQ ID NO: 2682 - DNA, 120 bp, synthetic construct
  source 1..120: mol_type = other DNA
taggtttggtgttaaggaagtagataaatataatattaaatttttattaaattatgagtttttgtttatggtttagtggagatattttggtattttattggtattgtaataaaatagttt

SEQ ID NO: 2683 - DNA, 120 bp, synthetic construct
  source 1..120: mol_type = other DNA
taaacttaatactaaaaaaacaaataaatacaacactaaaccttcactaaatcataaaattcttctcataatttaataaaaacactttaacattctattaatactacaacaaaacaatct

SEQ ID NO: 2684 - DNA, 120 bp, synthetic construct
  source 1..120: mol_type = other DNA
taggtttggtgttaaggaagtagataaatataatattaaatttttattaaattatgagattttttttatggtttagtggagatattttggtattttattggtattgtaataaaatagttt

SEQ ID NO: 2685 - DNA, 120 bp, synthetic construct; identical to SEQ ID NO: 2681
  source 1..120: mol_type = other DNA

SEQ ID NO: 2686 - DNA, 120 bp, synthetic construct; identical to SEQ ID NO: 2682
  source 1..120: mol_type = other DNA

SEQ ID NO: 2687 - DNA, 120 bp, synthetic construct; identical to SEQ ID NO: 2683
  source 1..120: mol_type = other DNA

SEQ ID NO: 2688 - DNA, 120 bp, synthetic construct; identical to SEQ ID NO: 2684
  source 1..120: mol_type = other DNA

SEQ ID NO: 2689 - DNA, 120 bp, synthetic construct
  source 1..120: mol_type = other DNA
aaacttaaccaacccacaatacaaaatactctcttaaaaaacattccaacctctactaaaatcacattaccatcttacaaaatcttaacctataacaaaaatacaaactaaaccccccca

SEQ ID NO: 2690 - DNA, 120 bp, synthetic construct
  source 1..120: mol_type = other DNA
agatttaattagtttataatatagagtatttttttgaggggtattttagtttttgttggggttatattgttattttatagagttttaatttgtgataggggtataggttgaattttttta

SEQ ID NO: 2691 - DNA, 120 bp, synthetic construct
  source 1..120: mol_type = other DNA
aaacttaaccaacccacaatacaaaatactctcttaaaaaacattccaacctctacttaaatcaaattaccatcttacaaaatcttaacctataacaaaaatacaaactaaaccccccca

SEQ ID NO: 2692 - DNA, 120 bp, synthetic construct
  source 1..120: mol_type = other DNA
agatttaattagtttataatatagagtatttttttgaggggtattttagtttttgtttgggttagattgttattttatagagttttaatttgtgataggggtataggttgaattttttta

SEQ ID NO: 2693 - DNA, 120 bp, synthetic construct; identical to SEQ ID NO: 2689
  source 1..120: mol_type = other DNA

SEQ ID NO: 2694 - DNA, 120 bp, synthetic construct; identical to SEQ ID NO: 2690
  source 1..120: mol_type = other DNA

SEQ ID NO: 2695 - DNA, 120 bp, synthetic construct; identical to SEQ ID NO: 2691
  source 1..120: mol_type = other DNA

SEQ ID NO: 2696 - DNA, 120 bp, synthetic construct; identical to SEQ ID NO: 2692
  source 1..120: mol_type = other DNA

SEQ ID NO: 2697 - DNA, 120 bp, synthetic construct
  source 1..120: mol_type = other DNA
tcacacaaaaacccactaaaaaaacctcctctcctatttatatatcaacaactaataccttatcaatactccaattctttccataatactattatctccatataaaactactattataaa

SEQ ID NO: 2698 - DNA, 120 bp, synthetic construct
  source 1..120: mol_type = other DNA
ttatataagagtttattaagaaaatttttttttttgtttatgtattagtagttggtgttttattaatgttttagttttttttatggtgttattgtttttatataaggttgttgttatgaa

SEQ ID NO: 2699 - DNA, 120 bp, synthetic construct
  source 1..120: mol_type = other DNA
tcacacaaaaacccactaaaaaaacctcctctcctatttatatatcaacaactaatacctattcaatactccaattctttccataatactattatctccatataaaactactattataaa

SEQ ID NO: 2700 - DNA, 120 bp, synthetic construct
  source 1..120: mol_type = other DNA
ttatataagagtttattaagaaaatttttttttttgtttatgtattagtagttggtgtttatttaatgttttagttttttttatggtgttattgtttttatataaggttgttgttatgaa

SEQ ID NO: 2701 - DNA, 120 bp, synthetic construct; identical to SEQ ID NO: 2697
  source 1..120: mol_type = other DNA

SEQ ID NO: 2702 - DNA, 120 bp, synthetic construct; identical to SEQ ID NO: 2698
  source 1..120: mol_type = other DNA

SEQ ID NO: 2703 - DNA, 120 bp, synthetic construct; identical to SEQ ID NO: 2699
  source 1..120: mol_type = other DNA

SEQ ID NO: 2704 - DNA, 120 bp, synthetic construct; identical to SEQ ID NO: 2700
  source 1..120: mol_type = other DNA

SEQ ID NO: 2705 - DNA, 120 bp, synthetic construct
  source 1..120: mol_type = other DNA
aaaattaaatcattcatcaaataatattaatatttccaattctcccaaaacaaattctacctaaaattcattctttaaaaaaaacaaaaaaatataaatatattttaattaaaactaaat

SEQ ID NO: 2706 - DNA, 120 bp, synthetic construct
  source 1..120: mol_type = other DNA
aagattaaattatttattaaataatgttaatatttttaatttttttaaagtaaattttatttggaatttattttttaaggaggatagagaaatgtaagtatattttgattgagattagat

SEQ ID NO: 2707 - DNA, 120 bp, synthetic construct
  source 1..120: mol_type = other DNA
aaaattaaatcattcatcaaataatattaatatttccaattctcccaaaacaaattctacaaaaaattcattctttaaaaaaaacaaaaaaatataaatatattttaattaaaactaaat

SEQ ID NO: 2708 - DNA, 120 bp, synthetic construct
  source 1..120: mol_type = other DNA
aagattaaattatttattaaataatgttaatatttttaatttttttaaagtaaattttatggggaatttattttttaaggaggatagagaaatgtaagtatattttgattgagattagat

SEQ ID NO: 2709 - DNA, 120 bp, synthetic construct; identical to SEQ ID NO: 2705
  source 1..120: mol_type = other DNA

SEQ ID NO: 2710 - DNA, 120 bp, synthetic construct; identical to SEQ ID NO: 2706
  source 1..120: mol_type = other DNA

SEQ ID NO: 2711 - DNA, 120 bp, synthetic construct
  source 1..120: mol_type = other DNA
aaaattaaatcattcatcaaataatattaatatttccaattctcccaaaacaaattctacgaaaaattcattctttaaaaaaaacaaaaaaatataaatatattttaattaaaactaaat

SEQ ID NO: 2712 - DNA, 120 bp, synthetic construct
  source 1..120: mol_type = other DNA
aagattaaattatttattaaataatgttaatatttttaatttttttaaagtaaattttacggggaatttattttttaaggaggatagagaaatgtaagtatattttgattgagattagat

SEQ ID NO: 2713 - DNA, 120 bp, synthetic construct
  source 1..120: mol_type = other DNA
ttaaataaaacacacaataaaatttataaaattataaaaaacatatactctatataaaataattttccaaaatatattattaaataaccataaaaaatttaaataaatactaccttttat

SEQ ID NO: 2714 - DNA, 120 bp, synthetic construct
  source 1..120: mol_type = other DNA
ttgaataaagtatataatggagtttgtggagttgtgaaaagtatgtattttatatgaagtgattttttaggatatattgttgagtgattatagaaggtttagatgaatgttattttttgt

SEQ ID NO: 2715 - DNA, 120 bp, synthetic construct
  source 1..120: mol_type = other DNA
ttaaataaaacacacaataaaatttataaaattataaaaaacatatactctatataaaatttttttccaaaatatattattaaataaccataaaaaatttaaataaatactaccttttat

SEQ ID NO: 2716 - DNA, 120 bp, synthetic construct
  source 1..120: mol_type = other DNA
ttgaataaagtatataatggagtttgtggagttgtgaaaagtatgtattttatatgaagtttttttttaggatatattgttgagtgattatagaaggtttagatgaatgttattttttgt

SEQ ID NO: 2717 - DNA, 120 bp, synthetic construct; identical to SEQ ID NO: 2713
  source 1..120: mol_type = other DNA

SEQ ID NO: 2718 - DNA, 120 bp, synthetic construct; identical to SEQ ID NO: 2714
  source 1..120: mol_type = other DNA

SEQ ID NO: 2719 - DNA, 120 bp, synthetic construct; identical to SEQ ID NO: 2715
  source 1..120: mol_type = other DNA

SEQ ID NO: 2720 - DNA, 120 bp, synthetic construct; identical to SEQ ID NO: 2716
  source 1..120: mol_type = other DNA

SEQ ID NO: 2721 - DNA, 120 bp, synthetic construct
  source 1..120: mol_type = other DNA
taataaaaacacccacctcaaaacctaaacaactatttcatcttaaaactaaacacatcacatttataaattcttttataaatataaaaataacccaaaatatccccctacataccttac

SEQ ID NO: 2722 - DNA, 120 bp, synthetic construct
  source 1..120: mol_type = other DNA
tgatgggagtatttattttaaagtttaagtgattattttattttagagttgaatatattatgtttatgagtttttttgtgaatatggaaataatttaaagtatttttttgtatgttttat

SEQ ID NO: 2723 - DNA, 120 bp, synthetic construct
  source 1..120: mol_type = other DNA
taataaaaacacccacctcaaaacctaaacaactatttcatcttaaaactaaacacatcaactttataaattcttttataaatataaaaataacccaaaatatccccctacataccttac

SEQ ID NO: 2724 - DNA, 120 bp, synthetic construct
  source 1..120: mol_type = other DNA
tgatgggagtatttattttaaagtttaagtgattattttattttagagttgaatatattagttttatgagtttttttgtgaatatggaaataatttaaagtatttttttgtatgttttat

SEQ ID NO: 2725 - DNA, 120 bp, synthetic construct
  source 1..120: mol_type = other DNA
taataaaaacacccacctcaaaacctaaacgactatttcatcttaaaactaaacacatcacgtttataaattcttttataaatataaaaataacccaaaatatccccctacataccttac

SEQ ID NO: 2726 - DNA, 120 bp, synthetic construct
  source 1..120: mol_type = other DNA
tgatgggagtatttattttaaagtttaagcgattattttattttagagttgaatatattacgtttatgagtttttttgtgaatatggaaataatttaaagtatttttttgtatgttttat

SEQ ID NO: 2727 - DNA, 120 bp, synthetic construct
  source 1..120: mol_type = other DNA
taataaaaacacccacctcaaaacctaaacgactatttcatcttaaaactaaacacatcaactttataaattcttttataaatataaaaataacccaaaatatccccctacataccttac

SEQ ID NO: 2728 - DNA, 120 bp, synthetic construct
  source 1..120: mol_type = other DNA
tgatgggagtatttattttaaagtttaagcgattattttattttagagttgaatatattagttttatgagtttttttgtgaatatggaaataatttaaagtatttttttgtatgttttat

SEQ ID NO: 2729 - DNA, 120 bp, synthetic construct
  source 1..120: mol_type = other DNA
aacatccttcaatacacccaaaaattctcctctctatacaaaaacactaattctttaaatatcaaaaactaaaacaaattacacattatcaaaaaaaaaatcaccctcaattactcatca

SEQ ID NO: 2730 - DNA, 120 bp, synthetic construct
  source 1..120: mol_type = other DNA
gatattttttagtatatttgaaaatttttttttttgtgtagaaatattggttttttgaatgttagggattggaatagattgtgtattgttgagaagagagttatttttaattatttatta

SEQ ID NO: 2731 - DNA, 120 bp, synthetic construct
  source 1..120: mol_type = other DNA
aacatccttcaatacacccaaaaattctcctctctatacaaaaacactaattctttaaattacaaaaactaaaacaaattacacattatcaaaaaaaaaatcaccctcaattactcatca

SEQ ID NO: 2732 - DNA, 120 bp, synthetic construct
  source 1..120: mol_type = other DNA
gatattttttagtatatttgaaaatttttttttttgtgtagaaatattggttttttgaattatagggattggaatagattgtgtattgttgagaagagagttatttttaattatttatta

SEQ ID NO: 2733 - DNA, 120 bp, synthetic construct
  source 1..120: mol_type = other DNA
aacatccttcaatacacccgaaaattctcctctctatacaaaaacactaattctttaaatatcaaaaactaaaacaaattacgcattatcgaaaaaaaaatcaccctcaattactcatca

SEQ ID NO: 2734 - DNA, 120 bp, synthetic construct
  source 1..120: mol_type = other DNA
gatattttttagtatattcgaaaatttttttttttgtgtagaaatattggttttttgaatgttagggattggaatagattgcgtattgtcgagaagagagttatttttaattatttatta

SEQ ID NO: 2735 - DNA, 120 bp, synthetic construct
  source 1..120: mol_type = other DNA
aacatccttcaatacacccgaaaattctcctctctatacaaaaacactaattctttaaattacaaaaactaaaacaaattacgcattatcgaaaaaaaaatcaccctcaattactcatca

SEQ ID NO: 2736 - DNA, 120 bp, synthetic construct
  source 1..120: mol_type = other DNA
gatattttttagtatattcgaaaatttttttttttgtgtagaaatattggttttttgaattatagggattggaatagattgcgtattgtcgagaagagagttatttttaattatttatta

SEQ ID NO: 2737 - DNA, 120 bp, synthetic construct
  source 1..120: mol_type = other DNA
aaaattataactaaatctccattctctccaactctaaactttaaccctactctctttcacaaataacaccaaaaatataacctaaaaccatacaaaaaaccataattaacaaaaacaaca

SEQ ID NO: 2738 - DNA, 120 bp, synthetic construct
  source 1..120: mol_type = other DNA
aaagttatgattaagtttttattttttttagttttggattttagttttgtttttttttatgggtaatattagagatgtaatttgggattatatagaggattatggttaataagggtagtg

SEQ ID NO: 2739 - DNA, 120 bp, synthetic construct
  source 1..120: mol_type = other DNA
aaaattataactaaatctccattctctccaactctaaactttaaccctactctctttcactcataacaccaaaaatataacctaaaaccatacaaaaaaccataattaacaaaaacaaca

SEQ ID NO: 2740 - DNA, 120 bp, synthetic construct
  source 1..120: mol_type = other DNA
aaagttatgattaagtttttattttttttagttttggattttagttttgtttttttttatttgtaatattagagatgtaatttgggattatatagaggattatggttaataagggtagtg

SEQ ID NO: 2741 - DNA, 120 bp, synthetic construct
  source 1..120: mol_type = other DNA
aaaattataactaaatctccattctctccaactctaaactttaaccctactctctttcacgaataacaccaaaaatataacctaaaaccatacaaaaaaccataattaacaaaaacaacg

SEQ ID NO: 2742 - DNA, 120 bp, synthetic construct
  source 1..120: mol_type = other DNA
aaagttatgattaagtttttattttttttagttttggattttagttttgtttttttttacgggtaatattagagatgtaatttgggattatatagaggattatggttaataagggtagcg

SEQ ID NO: 2743 - DNA, 120 bp, synthetic construct
  source 1..120: mol_type = other DNA
aaaattataactaaatctccattctctccaactctaaactttaaccctactctctttcactcgtaacaccaaaaatataacctaaaaccatacaaaaaaccataattaacaaaaacaacg

SEQ ID NO: 2744 - DNA, 120 bp, synthetic construct
  source 1..120: mol_type = other DNA
aaagttatgattaagtttttattttttttagttttggattttagttttgtttttttttattcgtaatattagagatgtaatttgggattatatagaggattatggttaataagggtagcg

SEQ ID NO: 2745 - DNA, 120 bp, synthetic construct
  source 1..120: mol_type = other DNA
ttccaatatataacatactttccataacaaatctaactaataattacttaaaaaaaaataacataacaacctatacaatattaactcatcctaaatattacttaataaaaaaaatataaa

SEQ ID NO: 2746 - DNA, 120 bp, synthetic construct
  source 1..120: mol_type = other DNA
ttttaatatatggtgtgttttttatagtagatttggttagtggttatttggaggaaggtaatgtgataatttatataatattaatttattttaaatgttgtttagtgaaagaaatataaa

SEQ ID NO: 2747 - DNA, 120 bp, synthetic construct
  source 1..120: mol_type = other DNA
ttccaatatataacatactttccataacaaatctaactaataattacttaaaaaaaaatataataacaacctatacaatattaactcatcctaaatattacttaataaaaaaaatataaa

SEQ ID NO: 2748 - DNA, 120 bp, synthetic construct
  source 1..120: mol_type = other DNA
ttttaatatatggtgtgttttttatagtagatttggttagtggttatttggaggaaggtatagtgataatttatataatattaatttattttaaatgttgtttagtgaaagaaatataaa

SEQ ID NO: 2749 - DNA, 120 bp, synthetic construct
  source 1..120: mol_type = other DNA
ttccaatatataacgtactttccataacaaatctaactaataattacttaaaaaaaaataacgtaacaacctatacaatattaactcatcctaaatattacttaataaaaaaaatataaa

SEQ ID NO: 2750 - DNA, 120 bp, synthetic construct
  source 1..120: mol_type = other DNA
ttttaatatatggcgtgttttttatagtagatttggttagtggttatttggaggaaggtaacgtgataatttatataatattaatttattttaaatgttgtttagtgaaagaaatataaa

SEQ ID NO: 2751 - DNA, 120 bp, synthetic construct
  source 1..120: mol_type = other DNA
ttccaatatataacgtactttccataacaaatctaactaataattacttaaaaaaaaatataataacaacctatacaatattaactcatcctaaatattacttaataaaaaaaatataaa

SEQ ID NO: 2752 - DNA, 120 bp, synthetic construct
  source 1..120: mol_type = other DNA
ttttaatatatggcgtgttttttatagtagatttggttagtggttatttggaggaaggtatagtgataatttatataatattaatttattttaaatgttgtttagtgaaagaaatataaa

SEQ ID NO: 2753 - DNA, 120 bp, synthetic construct
  source 1..120: mol_type = other DNA
aaataaaataaaatacaaataaaataaaaacaacttaattttttaaaaaccataatttcatatcttctaaaataaaataaactactaccttttttcccctcttatattataccaataact

SEQ ID NO: 2754 - DNA, 120 bp, synthetic construct
  source 1..120: mol_type = other DNA
aaataaaatgaaatataaataaaataaaaatagtttaattttttaaaagttatgattttgtattttttaaagtaaaataagttgttattttttttttttttttgtattgtattagtagtt

SEQ ID NO: 2755 - DNA, 120 bp, synthetic construct
  source 1..120: mol_type = other DNA
aaataaaataaaatacaaataaaataaaaacaacttaattttttaaaaaccataatttcaattcttctaaaataaaataaactactaccttttttcccctcttatattataccaataact

SEQ ID NO: 2756 - DNA, 120 bp, synthetic construct
  source 1..120: mol_type = other DNA
aaataaaatgaaatataaataaaataaaaatagtttaattttttaaaagttatgattttgatttttttaaagtaaaataagttgttattttttttttttttttgtattgtattagtagtt

SEQ ID NO: 2757 - DNA, 120 bp, synthetic construct
  source 1..120: mol_type = other DNA
aaataaaataaaatacaaataaaataaaaacaacttaattttttaaaaaccataatttcgtatcttctaaaataaaataaactactaccttttttcccctcttatattataccaataact

SEQ ID NO: 2758 - DNA, 120 bp, synthetic construct
  source 1..120: mol_type = other DNA
aaataaaatgaaatataaataaaataaaaatagtttaattttttaaaagttatgatttcgtattttttaaagtaaaataagttgttattttttttttttttttgtattgtattagtagtt

SEQ ID NO: 2759 - DNA, 120 bp, synthetic construct
  source 1..120: mol_type = other DNA
aaataaaataaaatacaaataaaataaaaacaacttaattttttaaaaaccataatttcgattcttctaaaataaaataaactactaccttttttcccctcttatattataccaataact

SEQ ID NO: 2760 - DNA, 120 bp, synthetic construct
  source 1..120: mol_type = other DNA
aaataaaatgaaatataaataaaataaaaatagtttaattttttaaaagttatgatttcgatttttttaaagtaaaataagttgttattttttttttttttttgtattgtattagtagtt

SEQ ID NO: 2761 - DNA, 120 bp, synthetic construct
  source 1..120: mol_type = other DNA
taaaccaaaataccaaaactacaacaactcaaataaaaaaaaaaccctattttctaaacatacaaacaccaaaattataaaacattctaccaaacacaaaaaccacaaaaacccaccttc

SEQ ID NO: 2762 - DNA, 120 bp, synthetic construct
  source 1..120: mol_type = other DNA
taaattaaggtgttaaggttgtggtagtttagatgggaaggggattttgttttttgagtatgtagatgttaggattataggatattttgttaggtatagaaattatgagagtttattttt

SEQ ID NO: 2763 - DNA, 120 bp, synthetic construct
  source 1..120: mol_type = other DNA
taaaccaaaataccaaaactacaacaactcaaataaaaaaaaaaccctattttctaaacaaccaaacaccaaaattataaaacattctaccaaacacaaaaaccacaaaaacccaccttc

SEQ ID NO: 2764 - DNA, 120 bp, synthetic construct
  source 1..120: mol_type = other DNA
taaattaaggtgttaaggttgtggtagtttagatgggaaggggattttgttttttgagtagttagatgttaggattataggatattttgttaggtatagaaattatgagagtttattttt

SEQ ID NO: 2765 - DNA, 120 bp, synthetic construct
  source 1..120: mol_type = other DNA
taaaccaaaataccaaaactacgacaactcaaataaaaaaaaaaccctattttctaaacatacaaacgccaaaattataaaacattctaccaaacacaaaaaccacgaaaacccaccttc

SEQ ID NO: 2766 - DNA, 120 bp, synthetic construct
  source 1..120: mol_type = other DNA
taaattaaggtgttaaggttgcggtagtttagatgggaaggggattttgttttttgagtatgtagacgttaggattataggatattttgttaggtatagaaattacgagagtttattttt

SEQ ID NO: 2767 - DNA, 120 bp, synthetic construct
  source 1..120: mol_type = other DNA
taaaccaaaataccaaaactacgacaactcaaataaaaaaaaaaccctattttctaaacaaccaaacgccaaaattataaaacattctaccaaacacaaaaaccacgaaaacccaccttc

SEQ ID NO: 2768 - DNA, 120 bp, synthetic construct
  source 1..120: mol_type = other DNA
taaattaaggtgttaaggttgcggtagtttagatgggaaggggattttgttttttgagtagttagacgttaggattataggatattttgttaggtatagaaattacgagagtttattttt

SEQ ID NO: 2769 - DNA, 120 bp, synthetic construct
  source 1..120: mol_type = other DNA
aatcttcatactaacccctcattctctaaaatatatactattttctacaacaaactacacaaccaatacccttacttaaaacaaatctaaacatcatatcaccacaatcttcattctaaa

SEQ ID NO: 2770 - DNA, 120 bp, synthetic construct
  source 1..120: mol_type = other DNA
aatttttatgttgattttttattttttagagtatatgttgttttttgtagtagattatatggttagtgtttttgtttggagtagatttagatattatattgttatggtttttattttgaa

SEQ ID NO: 2771 - DNA, 120 bp, synthetic construct
  source 1..120: mol_type = other DNA
aatcttcatactaacccctcattctctaaaatatatactattttctacaacaaactacacttccaatacccttacttaaaacaaatctaaacatcatatcaccacaatcttcattctaaa

SEQ ID NO: 2772 - DNA, 120 bp, synthetic construct
  source 1..120: mol_type = other DNA
aatttttatgttgattttttattttttagagtatatgttgttttttgtagtagattatatttttagtgtttttgtttggagtagatttagatattatattgttatggtttttattttgaa

SEQ ID NO: 2773 - DNA, 120 bp, synthetic construct
  source 1..120: mol_type = other DNA
aatcttcatactaacccctcattctctaaaatatatactattttctacaacaaactacacgaccaatacccttacttaaaacaaatctaaacatcatatcgccacgatcttcattctaaa

SEQ ID NO: 2774 - DNA, 120 bp, synthetic construct
  source 1..120: mol_type = other DNA
aatttttatgttgattttttattttttagagtatatgttgttttttgtagtagattatacggttagtgtttttgtttggagtagatttagatattatatcgttacggtttttattttgaa

SEQ ID NO: 2775 - DNA, 120 bp, synthetic construct
  source 1..120: mol_type = other DNA
aatcttcatactaacccctcattctctaaaatatatactattttctacaacaaactacacttccaatacccttacttaaaacaaatctaaacatcatatcgccacgatcttcattctaaa

SEQ ID NO: 2776 - DNA, 120 bp, synthetic construct
  source 1..120: mol_type = other DNA
aatttttatgttgattttttattttttagagtatatgttgttttttgtagtagattatatttttagtgtttttgtttggagtagatttagatattatatcgttacggtttttattttgaa

SEQ ID NO: 2777 - DNA, 120 bp, synthetic construct
  source 1..120: mol_type = other DNA
aatcttaacatccaataaattatctaattttaaattactcacaatttttcacaattttaaaaatacctaaataataattctttccatctataaaatttactatttccctataaaactaaa

SEQ ID NO: 2778 - DNA, 120 bp, synthetic construct
  source 1..120: mol_type = other DNA
aattttaatatttaatggattatttggttttagattatttataattttttataattttaggagtatttaaatgatgattttttttatttgtggagtttgttgtttttttatgagattaaa

SEQ ID NO: 2779 - DNA, 120 bp, synthetic construct
  source 1..120: mol_type = other DNA
aatcttaacatccaataaattatctaattttaaattactcacaatttttcacaattttaattatacctaaataataattctttccatctataaaatttactatttccctataaaactaaa

SEQ ID NO: 2780 - DNA, 120 bp, synthetic construct
  source 1..120: mol_type = other DNA
aattttaatatttaatggattatttggttttagattatttataattttttataattttagttgtatttaaatgatgattttttttatttgtggagtttgttgtttttttatgagattaaa

SEQ ID NO: 2781 - DNA, 120 bp, synthetic construct; identical to SEQ ID NO: 2777
  source 1..120: mol_type = other DNA

SEQ ID NO: 2782 - DNA, 120 bp, synthetic construct; identical to SEQ ID NO: 2778
  source 1..120: mol_type = other DNA

SEQ ID NO: 2783 - DNA, 120 bp, synthetic construct; identical to SEQ ID NO: 2779
  source 1..120: mol_type = other DNA

SEQ ID NO: 2784 - DNA, 120 bp, synthetic construct; identical to SEQ ID NO: 2780
  source 1..120: mol_type = other DNA

SEQ ID NO: 2785 - DNA, 120 bp, synthetic construct
  source 1..120: mol_type = other DNA
ttctcttttcaaattcataaaaaatcctcttttcacaccccctaaatcaataaaaccaaacccttcaacatcaccacaataacctaaaaaaaaacacttatcctatcaccaccaaaccct

SEQ ID NO: 2786 - DNA, 120 bp, synthetic construct
  source 1..120: mol_type = other DNA
ttttttttttaaatttatggaaaattttttttttatattttttgggttagtgaagttagattttttagtattattatagtggtttagaaagggatatttgttttgttattattaggtttt

SEQ ID NO: 2787 - DNA, 120 bp, synthetic construct
  source 1..120: mol_type = other DNA
ttctcttttcaaattcataaaaaatcctcttttcacaccccctaaatcaataaaaccaaaaacttcaacatcaccacaataacctaaaaaaaaacacttatcctatcaccaccaaaccct

SEQ ID NO: 2788 - DNA, 120 bp, synthetic construct
  source 1..120: mol_type = other DNA
ttttttttttaaatttatggaaaattttttttttatattttttgggttagtgaagttagaaattttagtattattatagtggtttagaaagggatatttgttttgttattattaggtttt

SEQ ID NO: 2789 - DNA, 120 bp, synthetic construct; identical to SEQ ID NO: 2785
  source 1..120: mol_type = other DNA

SEQ ID NO: 2790 - DNA, 120 bp, synthetic construct; identical to SEQ ID NO: 2786
  source 1..120: mol_type = other DNA

SEQ ID NO: 2791 - DNA, 120 bp, synthetic construct; identical to SEQ ID NO: 2787
  source 1..120: mol_type = other DNA

SEQ ID NO: 2792 - DNA, 120 bp, synthetic construct; identical to SEQ ID NO: 2788
  source 1..120: mol_type = other DNA

SEQ ID NO: 2793 - DNA, 120 bp, synthetic construct
  source 1..120: mol_type = other DNA
ccatttaataatatactttcaattttaaaataaaacattatattaataaaaaaacttaacaacttcttaaaaaacaaaatatactatttatcaaattccatttaaatttaactatttaat

SEQ ID NO: 2794 - DNA, 120 bp, synthetic construct
  source 1..120: mol_type = other DNA
ttatttagtgatatatttttagttttaaaataaaatattgtgttgatggaaaggtttgatgattttttagaaaataggatgtgttatttattaaattttatttaagtttagttatttggt

SEQ ID NO: 2795 - DNA, 120 bp, synthetic construct
  source 1..120: mol_type = other DNA
ccatttaataatatactttcaattttaaaataaaacattatattaataaaaaaacttaacttcttcttaaaaaacaaaatatactatttatcaaattccatttaaatttaactatttaat

SEQ ID NO: 2796 - DNA, 120 bp, synthetic construct
  source 1..120: mol_type = other DNA
ttatttagtgatatatttttagttttaaaataaaatattgtgttgatggaaaggtttgatttttttttagaaaataggatgtgttatttattaaattttatttaagtttagttatttggt

SEQ ID NO: 2797 - DNA, 120 bp, synthetic construct
  source 1..120: mol_type = other DNA
ccatttaataatatactttcaattttaaaataaaacattatattaataaaaaaacttaacgacttcttaaaaaacaaaatatactatttatcaaattccatttaaatttaactatttaat

SEQ ID NO: 2798 - DNA, 120 bp, synthetic construct
  source 1..120: mol_type = other DNA
ttatttagtgatatatttttagttttaaaataaaatattgtgttgatggaaaggtttgacgattttttagaaaataggatgtgttatttattaaattttatttaagtttagttatttggt

SEQ ID NO: 2799 - DNA, 120 bp, synthetic construct; identical to SEQ ID NO: 2795
  source 1..120: mol_type = other DNA

SEQ ID NO: 2800 - DNA, 120 bp, synthetic construct; identical to SEQ ID NO: 2796
  source 1..120: mol_type = other DNA

SEQ ID NO: 2801 - DNA, 120 bp, synthetic construct
  source 1..120: mol_type = other DNA
atataataaataccttaactctccttaaaatataaaaaattattaatactacaataaaaaaaataactatcctatttttaaccttattttttaaaaaaaaaactaaacaacatatttaac

SEQ ID NO: 2802 - DNA, 120 bp, synthetic construct
  source 1..120: mol_type = other DNA
gtatggtaggtgttttaattttttttagaatatagaagattattgatattgtaatgaaaaaaatggttattttgtttttaattttattttttaaaagaaaaattgaataatatgtttgat

SEQ ID NO: 2803 - DNA, 120 bp, synthetic construct
  source 1..120: mol_type = other DNA
atataataaataccttaactctccttaaaatataaaaaattattaatactacaattaaaaaaatatctatcctatttttaaccttattttttaaaaaaaaaactaaacaacatatttaac

SEQ ID NO: 2804 - DNA, 120 bp, synthetic construct
  source 1..120: mol_type = other DNA
gtatggtaggtgttttaattttttttagaatatagaagattattgatattgtaattaaaaaaatgtttattttgtttttaattttattttttaaaagaaaaattgaataatatgtttgat

SEQ ID NO: 2805 - DNA, 120 bp, synthetic construct; identical to SEQ ID NO: 2801
  source 1..120: mol_type = other DNA

SEQ ID NO: 2806 - DNA, 120 bp, synthetic construct; identical to SEQ ID NO: 2802
  source 1..120: mol_type = other DNA

SEQ ID NO: 2807 - DNA, 120 bp, synthetic construct; identical to SEQ ID NO: 2803
  source 1..120: mol_type = other DNA

SEQ ID NO: 2808 - DNA, 120 bp, synthetic construct; identical to SEQ ID NO: 2804
  source 1..120: mol_type = other DNA

SEQ ID NO: 2809 - DNA, 120 bp, synthetic construct
  source 1..120: mol_type = other DNA
aaaataaaaataaatctaaataattcaataaactacatataaccaaatctaaataataataaaaaattattcaaactaaaatccatttcccaaataatcaaattaatatcatctaattaa

SEQ ID NO: 2810 - DNA, 120 bp, synthetic construct
  source 1..120: mol_type = other DNA
aaaatagaaatgaatttgaatgatttaatagattgtatataattaagtttaaatgatggtaaaggattgtttaagttaaaatttattttttaaatggttagattgatgttatttgattaa

SEQ ID NO: 2811 - DNA, 120 bp, synthetic construct
  source 1..120: mol_type = other DNA
aaaataaaaataaatctaaataattcaataaactacatataaccaaatctaaataattataaataattattcaaactaaaatccatttcccaaataatcaaattaatatcatctaattaa

SEQ ID NO: 2812 - DNA, 120 bp, synthetic construct
  source 1..120: mol_type = other DNA
aaaatagaaatgaatttgaatgatttaatagattgtatataattaagtttaaatgattgtaaatgattgtttaagttaaaatttattttttaaatggttagattgatgttatttgattaa

SEQ ID NO: 2813 - DNA, 120 bp, synthetic construct; identical to SEQ ID NO: 2809
  source 1..120: mol_type = other DNA

SEQ ID NO: 2814 - DNA, 120 bp, synthetic construct; identical to SEQ ID NO: 2810
  source 1..120: mol_type = other DNA

SEQ ID NO: 2815 - DNA, 120 bp, synthetic construct; identical to SEQ ID NO: 2811
  source 1..120: mol_type = other DNA

SEQ ID NO: 2816 - DNA, 120 bp, synthetic construct; identical to SEQ ID NO: 2812
  source 1..120: mol_type = other DNA

SEQ ID NO: 2817 - DNA, 120 bp, synthetic construct
  source 1..120: mol_type = other DNA
ttaaaatcatctaaattttaattcaatattcttctttaacttatctataaatattacaaatttatttacctcaatatttcaactttcttaaatttttttttcctaaaatataacctaaaa

SEQ ID NO: 2818 - DNA, 120 bp, synthetic construct
  source 1..120: mol_type = other DNA
ttaaaattatttgagttttagtttaatatttttttttaatttatttgtaagtgttataggtttatttattttagtattttagtttttttggattttttttttttgaaatataatttagag

SEQ ID NO: 2819 - DNA, 120 bp, synthetic construct
  source 1..120: mol_type = other DNA
ttaaaatcatctaaattttaattcaatattcttctttaacttatctataaatattactaatttctttacctcaatatttcaactttcttaaatttttttttcctaaaatataacctaaaa

SEQ ID NO: 2820 - DNA, 120 bp, synthetic construct
  source 1..120: mol_type = other DNA
ttaaaattatttgagttttagtttaatatttttttttaatttatttgtaagtgttattggtttttttattttagtattttagtttttttggattttttttttttgaaatataatttagag

SEQ ID NO: 2821 - DNA, 120 bp, synthetic construct; identical to SEQ ID NO: 2817
  source 1..120: mol_type = other DNA

SEQ ID NO: 2822 - DNA, 120 bp, synthetic construct; identical to SEQ ID NO: 2818
  source 1..120: mol_type = other DNA

SEQ ID NO: 2823 - DNA, 120 bp, synthetic construct; identical to SEQ ID NO: 2819
  source 1..120: mol_type = other DNA

SEQ ID NO: 2824 - DNA, 120 bp, synthetic construct; identical to SEQ ID NO: 2820
  source 1..120: mol_type = other DNA

SEQ ID NO: 2825 - DNA, 120 bp, synthetic construct
  source 1..120: mol_type = other DNA
caattttattaaaatcattataaattcacatacaactacaaaaaaaataataatataaaaaaaacctctatacaatttaccaaattcccttcaataataacatttaacaaaaatataata

SEQ ID NO: 2826 - DNA, 120 bp, synthetic construct
  source 1..120: mol_type = other DNA
taattttattaagattattgtaaatttatatgtagttgtaaaaaaaataataatatagagagagtttttgtatgatttattaagttttttttaatggtaatatttggtaaaagtatagta

SEQ ID NO: 2827 - DNA, 120 bp, synthetic construct
  source 1..120: mol_type = other DNA
caattttattaaaatcattataaattcacatacaactacaaaaaaaataataatatacaaaaatcctctatacaatttaccaaattcccttcaataataacatttaacaaaaatataata

SEQ ID NO: 2828 - DNA, 120 bp, synthetic construct
  source 1..120: mol_type = other DNA
taattttattaagattattgtaaatttatatgtagttgtaaaaaaaataataatatatagagattttttgtatgatttattaagttttttttaatggtaatatttggtaaaagtatagta

SEQ ID NO: 2829 - DNA, 120 bp, synthetic construct
  source 1..120: mol_type = other DNA
caattttattaaaatcattataaattcacatacaactacaaaaaaaataataatataaaaaaaacctctatacgatttaccaaattcccttcaataataacatttaacaaaaatataata

SEQ ID NO: 2830 - DNA, 120 bp, synthetic construct
  source 1..120: mol_type = other DNA
taattttattaagattattgtaaatttatatgtagttgtaaaaaaaataataatatagagagagtttttgtacgatttattaagttttttttaatggtaatatttggtaaaagtatagta

SEQ ID NO: 2831 - DNA, 120 bp, synthetic construct
  source 1..120: mol_type = other DNA
caattttattaaaatcattataaattcacatacaactacaaaaaaaataataatatacaaaaatcctctatacgatttaccaaattcccttcaataataacatttaacaaaaatataata

SEQ ID NO: 2832 - DNA, 120 bp, synthetic construct
  source 1..120: mol_type = other DNA
taattttattaagattattgtaaatttatatgtagttgtaaaaaaaataataatatatagagattttttgtacgatttattaagttttttttaatggtaatatttggtaaaagtatagta

SEQ ID NO: 2833 - DNA, 120 bp, synthetic construct
  source 1..120: mol_type = other DNA
tatttataatccattatttaaaaaacttatacataatccatcactaccattacctccttactcacaatactactacacatacaaacaatactaaacaaaaaactatataaaaaataataa

SEQ ID NO: 2834 - DNA, 120 bp, synthetic construct
  source 1..120: mol_type = other DNA
tgtttgtaatttattatttaaggagtttatgtataatttattattattattgtttttttgtttatagtattattgtatatgtaagtagtattaaataaggaattatataaggaatgatga

SEQ ID NO: 2835 - DNA, 120 bp, synthetic construct
  source 1..120: mol_type = other DNA
tatttataatccattatttaaaaaacttatacataatccatcactaccattacctccatactcccaatactactacacatacaaacaatactaaacaaaaaactatataaaaaataataa

SEQ ID NO: 2836 - DNA, 120 bp, synthetic construct
  source 1..120: mol_type = other DNA
tgtttgtaatttattatttaaggagtttatgtataatttattattattattgtttttgtgtttttagtattattgtatatgtaagtagtattaaataaggaattatataaggaatgatga

SEQ ID NO: 2837 - DNA, 120 bp, synthetic construct; identical to SEQ ID NO: 2833
  source 1..120: mol_type = other DNA

SEQ ID NO: 2838 - DNA, 120 bp, synthetic construct; identical to SEQ ID NO: 2834
  source 1..120: mol_type = other DNA

SEQ ID NO: 2839 - DNA, 120 bp, synthetic construct
  source 1..120: mol_type = other DNA
tatttataatccattatttaaaaaacttatacataatccatcactaccattacctccgtactcccaatactactacacatacaaacaatactaaacaaaaaactatataaaaaataataa

SEQ ID NO: 2840 - DNA, 120 bp, synthetic construct
  source 1..120: mol_type = other DNA
tgtttgtaatttattatttaaggagtttatgtataatttattattattattgttttcgtgtttttagtattattgtatatgtaagtagtattaaataaggaattatataaggaatgatga

SEQ ID NO: 2841 - DNA, 120 bp, synthetic construct
  source 1..120: mol_type = other DNA
ataaattaaccttaatcaaaataactaaaataacttaacttctttcacctatctcattttccaacaaattaactcaaatatatttctctcaaaacaataacaaataacaaaaacacaaac

SEQ ID NO: 2842 - DNA, 120 bp, synthetic construct
  source 1..120: mol_type = other DNA
ataggttggttttaattagaatgattgggatgatttggttttttttatttattttattttttagtaggttagtttaaatgtattttttttaaggtaatagtagatggtaagagtataagt

SEQ ID NO: 2843 - DNA, 120 bp, synthetic construct
  source 1..120: mol_type = other DNA
ataaattaaccttaatcaaaataactaaaataacttaacttctttcacctatctcaatttccaactaattaactcaaatatatttctctcaaaacaataacaaataacaaaaacacaaac

SEQ ID NO: 2844 - DNA, 120 bp, synthetic construct
  source 1..120: mol_type = other DNA
ataggttggttttaattagaatgattgggatgatttggttttttttatttattttaatttttagttggttagtttaaatgtattttttttaaggtaatagtagatggtaagagtataagt

SEQ ID NO: 2845 - DNA, 120 bp, synthetic construct; identical to SEQ ID NO: 2841
  source 1..120: mol_type = other DNA

SEQ ID NO: 2846 - DNA, 120 bp, synthetic construct; identical to SEQ ID NO: 2842
  source 1..120: mol_type = other DNA

SEQ ID NO: 2847 - DNA, 120 bp, synthetic construct; identical to SEQ ID NO: 2843
  source 1..120: mol_type = other DNA

SEQ ID NO: 2848 - DNA, 120 bp, synthetic construct; identical to SEQ ID NO: 2844
  source 1..120: mol_type = other DNA

SEQ ID NO: 2849 - DNA, 120 bp, synthetic construct
  source 1..120: mol_type = other DNA
aacctaaaaaacacctatacttttaaacttactccaaaacttcaccaatacttaaaaatatttacacaaaactttcaaataaacatatacttttaaaaattaatataaccaaaaacaata

SEQ ID NO: 2850 - DNA, 120 bp, synthetic construct
  source 1..120: mol_type = other DNA
agtttaagaaatatttatatttttgggtttattttaaaattttattaatgtttgaaagtgtttatatagaatttttagataagtatatatttttaaaaattaatatgattggaaatagtg

SEQ ID NO: 2851 - DNA, 120 bp, synthetic construct
  source 1..120: mol_type = other DNA
aacctaaaaaacacctatacttttaaacttactccaaaacttcaccaatacttaaaactatttaaacaaaactttcaaataaacatatacttttaaaaattaatataaccaaaaacaata

SEQ ID NO: 2852 - DNA, 120 bp, synthetic construct
  source 1..120: mol_type = other DNA
agtttaagaaatatttatatttttgggtttattttaaaattttattaatgtttgaaattgtttaaatagaatttttagataagtatatatttttaaaaattaatatgattggaaatagtg

SEQ ID NO: 2853 - DNA, 120 bp, synthetic construct
  source 1..120: mol_type = other DNA
aacctaaaaaacacctatacttttaaacttactccaaaacttcaccaatacttaaaaatatttacacaaaactttcaaataaacatatacttttaaaaattaatataaccgaaaacaata

SEQ ID NO: 2854 - DNA, 120 bp, synthetic construct
  source 1..120: mol_type = other DNA
agtttaagaaatatttatatttttgggtttattttaaaattttattaatgtttgaaagtgtttatatagaatttttagataagtatatatttttaaaaattaatatgatcggaaatagtg

SEQ ID NO: 2855 - DNA, 120 bp, synthetic construct
  source 1..120: mol_type = other DNA
aacctaaaaaacacctatacttttaaacttactccaaaacttcaccaatacttaaaactatttaaacaaaactttcaaataaacatatacttttaaaaattaatataaccgaaaacaata

SEQ ID NO: 2856 - DNA, 120 bp, synthetic construct
  source 1..120: mol_type = other DNA
agtttaagaaatatttatatttttgggtttattttaaaattttattaatgtttgaaattgtttaaatagaatttttagataagtatatatttttaaaaattaatatgatcggaaatagtg

SEQ ID NO: 2857 - DNA, 120 bp, synthetic construct
  source 1..120: mol_type = other DNA
taatttaaaataataattctcaaccaaaaataattttacttattaaaaaacaattcaaaaaatctaaaaacattttttattataataactaaataaaaaaaatattactaaccaaaataa

SEQ ID NO: 2858 - DNA, 120 bp, synthetic construct
  source 1..120: mol_type = other DNA
tagtttaagatagtgatttttaattaaggatgattttgtttgttaggggatagtttaaaaggtttggggatattttttgttgtggtgattggatggggagggtgttattggttaggataa

SEQ ID NO: 2859 - DNA, 120 bp, synthetic construct
  source 1..120: mol_type = other DNA
taatttaaaataataattctcaaccaaaaataattttacttattaaaaaacaattcacaaaatcaaaaaacattttttattataataactaaataaaaaaaatattactaaccaaaataa

SEQ ID NO: 2860 - DNA, 120 bp, synthetic construct
  source 1..120: mol_type = other DNA
tagtttaagatagtgatttttaattaaggatgattttgtttgttaggggatagtttataaggttgggggatattttttgttgtggtgattggatggggagggtgttattggttaggataa

SEQ ID NO: 2861 - DNA, 120 bp, synthetic construct; identical to SEQ ID NO: 2857
  source 1..120: mol_type = other DNA

SEQ ID NO: 2862 - DNA, 120 bp, synthetic construct; identical to SEQ ID NO: 2858
  source 1..120: mol_type = other DNA

SEQ ID NO: 2863 - DNA, 120 bp, synthetic construct
  source 1..120: mol_type = other DNA
taatttaaaataataattctcaaccaaaaataattttacttattaaaaaacaattcacaaaatcgaaaaacattttttattataataactaaataaaaaaaatattactaaccaaaataa

SEQ ID NO: 2864 - DNA, 120 bp, synthetic construct
  source 1..120: mol_type = other DNA
tagtttaagatagtgatttttaattaaggatgattttgtttgttaggggatagtttataaggtcgggggatattttttgttgtggtgattggatggggagggtgttattggttaggataa

SEQ ID NO: 2865 - DNA, 120 bp, synthetic construct
  source 1..120: mol_type = other DNA
actctaaaaaaacaatttataacaacatatcacccaaactaaaactcaacacaacttaaccctaacacataaatttaaaatacaaaaatataacaataccaaaaattactcaaactatac

SEQ ID NO: 2866 - DNA, 120 bp, synthetic construct
  source 1..120: mol_type = other DNA
gttttgaagaagtagtttatagtggtatgttatttaagttaggatttggtataatttagttttagtatatggatttagagtgtaagggtatggtaatgttgaaaattatttagattgtgt

SEQ ID NO: 2867 - DNA, 120 bp, synthetic construct
  source 1..120: mol_type = other DNA
actctaaaaaaacaatttataacaacatatcacccaaactaaaactcaacacaacttaaacataacacataaatttaaaatacaaaaatataacaataccaaaaattactcaaactatac

SEQ ID NO: 2868 - DNA, 120 bp, synthetic construct
  source 1..120: mol_type = other DNA
gttttgaagaagtagtttatagtggtatgttatttaagttaggatttggtataatttagatgtagtatatggatttagagtgtaagggtatggtaatgttgaaaattatttagattgtgt

SEQ ID NO: 2869 - DNA, 120 bp, synthetic construct
  source 1..120: mol_type = other DNA
actctaaaaaaacaatttataacgacatatcacccaaactaaaactcgacacaacttaaccctaacacataaatttaaaatacaaaaatataacaataccgaaaattactcaaactatac

SEQ ID NO: 2870 - DNA, 120 bp, synthetic construct
  source 1..120: mol_type = other DNA
gttttgaagaagtagtttatagcggtatgttatttaagttaggattcggtataatttagttttagtatatggatttagagtgtaagggtatggtaatgtcgaaaattatttagattgtgt

SEQ ID NO: 2871 - DNA, 120 bp, synthetic construct
  source 1..120: mol_type = other DNA
actctaaaaaaacaatttataacgacatatcacccaaactaaaactcgacacaacttaaacgtaacacataaatttaaaatacaaaaatataacaataccgaaaattactcaaactatac

SEQ ID NO: 2872 - DNA, 120 bp, synthetic construct
  source 1..120: mol_type = other DNA
gttttgaagaagtagtttatagcggtatgttatttaagttaggattcggtataatttagacgtagtatatggatttagagtgtaagggtatggtaatgtcgaaaattatttagattgtgt

SEQ ID NO: 2873 - DNA, 120 bp, synthetic construct
  source 1..120: mol_type = other DNA
taaccatcccaacaaccaaatcaaaccatctcctaaaaacctaacaaaaccaaatcaatatcacaaaaaaacccccacatcaataaatctcctatccaacttataattaaaccccaaatc

SEQ ID NO: 2874 - DNA, 120 bp, synthetic construct
  source 1..120: mol_type = other DNA
tagttattttagtagttaggttagattattttttgggaatttagtagggttaaattagtattgtaggagagtttttatgttagtgaattttttgtttagtttgtggttgggttttaggtt

SEQ ID NO: 2875 - DNA, 120 bp, synthetic construct
  source 1..120: mol_type = other DNA
taaccatcccaacaaccaaatcaaaccatctcctaaaaacctaacaaaaccaaatcaatttaacaaaaaaacccccacatcaataaatctcctatccaacttataattaaaccccaaatc

SEQ ID NO: 2876 - DNA, 120 bp, synthetic construct
  source 1..120: mol_type = other DNA
tagttattttagtagttaggttagattattttttgggaatttagtagggttaaattagtttggtaggagagtttttatgttagtgaattttttgtttagtttgtggttgggttttaggtt

SEQ ID NO: 2877 - DNA, 120 bp, synthetic construct
  source 1..120: mol_type = other DNA
taaccatcccaacaaccaaatcaaaccatctcctaaaaacctaacaaaaccaaatcaatatcgcaaaaaaacccccacgtcaataaatctcctatccaacttataattaaaccccaaatc

SEQ ID NO: 2878 - DNA, 120 bp, synthetic construct
  source 1..120: mol_type = other DNA
tagttattttagtagttaggttagattattttttgggaatttagtagggttaaattagtatcgtaggagagtttttacgttagtgaattttttgtttagtttgtggttgggttttaggtt

SEQ ID NO: 2879 - DNA, 120 bp, synthetic construct
  source 1..120: mol_type = other DNA
taaccatcccaacaaccaaatcaaaccatctcctaaaaacctaacaaaaccaaatcaatttaacaaaaaaacccccacgtcaataaatctcctatccaacttataattaaaccccaaatc

SEQ ID NO: 2880 - DNA, 120 bp, synthetic construct
  source 1..120: mol_type = other DNA
tagttattttagtagttaggttagattattttttgggaatttagtagggttaaattagtttggtaggagagtttttacgttagtgaattttttgtttagtttgtggttgggttttaggtt

SEQ ID NO: 2881 - DNA, 120 bp, synthetic construct
  source 1..120: mol_type = other DNA
caactcataacataaaactctcccaacacttacaaaataacccatcattacctctctaaaaaactcatttttacaaataaaaccttaaaatcataacacaaaaaaacaaaacccctaaca

SEQ ID NO: 2882 - DNA, 120 bp, synthetic construct
  source 1..120: mol_type = other DNA
tagtttatgatatgaggtttttttaatatttataggataatttattattatttttttgaagggtttatttttataagtgaggttttgaggttatagtatagaaagatagggtttttgata

SEQ ID NO: 2883 - DNA, 120 bp, synthetic construct
  source 1..120: mol_type = other DNA
caactcataacataaaactctcccaacacttacaaaataacccatcattacctctctaatatactcatttttacaaataaaaccttaaaatcataacacaaaaaaacaaaacccctaaca

SEQ ID NO: 2884 - DNA, 120 bp, synthetic construct
  source 1..120: mol_type = other DNA
tagtttatgatatgaggtttttttaatatttataggataatttattattatttttttgatgtgtttatttttataagtgaggttttgaggttatagtatagaaagatagggtttttgata

SEQ ID NO: 2885 - DNA, 120 bp, synthetic construct; identical to SEQ ID NO: 2881
  source 1..120: mol_type = other DNA

SEQ ID NO: 2886 - DNA, 120 bp, synthetic construct; identical to SEQ ID NO: 2882
  source 1..120: mol_type = other DNA

SEQ ID NO: 2887 - DNA, 120 bp, synthetic construct; identical to SEQ ID NO: 2883
  source 1..120: mol_type = other DNA

SEQ ID NO: 2888 - DNA, 120 bp, synthetic construct; identical to SEQ ID NO: 2884
  source 1..120: mol_type = other DNA

SEQ ID NO: 2889 - DNA, 120 bp, synthetic construct
  source 1..120: mol_type = other DNA
accctccacaaaacttaaacttttctcctatccacttaaaacaatcaaaactactcaaaaatcccacaaactccattatctaacccaacttttataaaaaaaactacaaaaataaaataa

SEQ ID NO: 2890 - DNA, 120 bp, synthetic construct
  source 1..120: mol_type = other DNA
attttttatagaatttaagttttttttttgtttatttgggataattagaattgtttaggggttttatagattttattatttggtttagtttttgtggggagaattgtaagagtagggtag

SEQ ID NO: 2891 - DNA, 120 bp, synthetic construct
  source 1..120: mol_type = other DNA
accctccacaaaacttaaacttttctcctatccacttaaaacaatcaaaactactcaataatcacacaaactccattatctaacccaacttttataaaaaaaactacaaaaataaaataa

SEQ ID NO: 2892 - DNA, 120 bp, synthetic construct
  source 1..120: mol_type = other DNA
attttttatagaatttaagttttttttttgtttatttgggataattagaattgtttagtggttatatagattttattatttggtttagtttttgtggggagaattgtaagagtagggtag

SEQ ID NO: 2893 - DNA, 120 bp, synthetic construct; identical to SEQ ID NO: 2889
  source 1..120: mol_type = other DNA

SEQ ID NO: 2894 - DNA, 120 bp, synthetic construct; identical to SEQ ID NO: 2890
  source 1..120: mol_type = other DNA

SEQ ID NO: 2895 - DNA, 120 bp, synthetic construct; identical to SEQ ID NO: 2891
  source 1..120: mol_type = other DNA

SEQ ID NO: 2896 - DNA, 120 bp, synthetic construct; identical to SEQ ID NO: 2892
  source 1..120: mol_type = other DNA

SEQ ID NO: 2897 - DNA, 120 bp, synthetic construct
  source 1..120: mol_type = other DNA
ataaaaaaacccaaataaaaatacaacaataaaaaatcataaataataaaaaatttctttaacaaattcctcaataaattcaacattaccaaacccataaaaaaaaaacaattaataaac

SEQ ID NO: 2898 - DNA, 120 bp, synthetic construct
  source 1..120: mol_type = other DNA
atagaaagatttaaatagaaatgtaatagtgaaaaattataagtgatgaagaatttttttgataggttttttagtagatttaatattgttaagtttatggaggaaaaataattaatgaat

SEQ ID NO: 2899 - DNA, 120 bp, synthetic construct
  source 1..120: mol_type = other DNA
ataaaaaaacccaaataaaaatacaacaataaaaaatcataaataataaaaaatttctttcccaaattcctcaataaattcaacattaccaaacccataaaaaaaaaacaattaataaac

SEQ ID NO: 2900 - DNA, 120 bp, synthetic construct
  source 1..120: mol_type = other DNA
atagaaagatttaaatagaaatgtaatagtgaaaaattataagtgatgaagaattttttttttaggttttttagtagatttaatattgttaagtttatggaggaaaaataattaatgaat

SEQ ID NO: 2901 - DNA, 120 bp, synthetic construct; identical to SEQ ID NO: 2897
  source 1..120: mol_type = other DNA

SEQ ID NO: 2902 - DNA, 120 bp, synthetic construct; identical to SEQ ID NO: 2898
  source 1..120: mol_type = other DNA

SEQ ID NO: 2903 - DNA, 120 bp, synthetic construct; identical to SEQ ID NO: 2899
  source 1..120: mol_type = other DNA

SEQ ID NO: 2904 - DNA, 120 bp, synthetic construct; identical to SEQ ID NO: 2900
  source 1..120: mol_type = other DNA

SEQ ID NO: 2905 - DNA, 120 bp, synthetic construct
  source 1..120: mol_type = other DNA
ccccataaccctactactataaaacaacaccacctccttaaaaactaataacctactcatataaaataaaacctctccatcctccacttcctcacaatcaacacccccaaacaccttccc

SEQ ID NO: 2906 - DNA, 120 bp, synthetic construct
  source 1..120: mol_type = other DNA
ttttatggttttgttattatggggtaatattatttttttggaggttgatgatttgtttatataggatggggtttttttattttttatttttttataattagtatttttagatattttttt

SEQ ID NO: 2907 - DNA, 120 bp, synthetic construct
  source 1..120: mol_type = other DNA
ccccataaccctactactataaaacaacaccacctccttaaaaactaataacctaatcatataaattaaaacctctccatcctccacttcctcacaatcaacacccccaaacaccttccc

SEQ ID NO: 2908 - DNA, 120 bp, synthetic construct
  source 1..120: mol_type = other DNA
ttttatggttttgttattatggggtaatattatttttttggaggttgatgatttggttatataggttggggtttttttattttttatttttttataattagtatttttagatattttttt

SEQ ID NO: 2909 - DNA, 120 bp, synthetic construct; identical to SEQ ID NO: 2905
  source 1..120: mol_type = other DNA

SEQ ID NO: 2910 - DNA, 120 bp, synthetic construct; identical to SEQ ID NO: 2906
  source 1..120: mol_type = other DNA

SEQ ID NO: 2911 - DNA, 120 bp, synthetic construct; identical to SEQ ID NO: 2907
  source 1..120: mol_type = other DNA

SEQ ID NO: 2912 - DNA, 120 bp, synthetic construct; identical to SEQ ID NO: 2908
  source 1..120: mol_type = other DNA

SEQ ID NO: 2913 - DNA, 120 bp, synthetic construct
  source 1..120: mol_type = other DNA
aaaataaacaaatatatcttaaataattttaaaattttatcacaaaataaatacatattatcaacaacactttatctactctacaaacttaactaaataaatttttcacacctacattat

SEQ ID NO: 2914 - DNA, 120 bp, synthetic construct
  source 1..120: mol_type = other DNA
aaagtgaataagtatgttttaagtagttttggagttttattataaaataaatatatattgttagtagtattttatttgttttataaatttgattaaataagttttttatatttgtattgt

SEQ ID NO: 2915 - DNA, 120 bp, synthetic construct
  source 1..120: mol_type = other DNA
aaaataaacaaatatatcttaaataattttaaaattttatcacaaaataaatacatattctctacaacactttatctactctacaaacttaactaaataaatttttcacacctacattat

SEQ ID NO: 2916 - DNA, 120 bp, synthetic construct
  source 1..120: mol_type = other DNA
aaagtgaataagtatgttttaagtagttttggagttttattataaaataaatatatattttttgtagtattttatttgttttataaatttgattaaataagttttttatatttgtattgt

SEQ ID NO: 2917 - DNA, 120 bp, synthetic construct; identical to SEQ ID NO: 2913
  source 1..120: mol_type = other DNA

SEQ ID NO: 2918 - DNA, 120 bp, synthetic construct; identical to SEQ ID NO: 2914
  source 1..120: mol_type = other DNA

SEQ ID NO: 2919 - DNA, 120 bp, synthetic construct; identical to SEQ ID NO: 2915
  source 1..120: mol_type = other DNA

SEQ ID NO: 2920 - DNA, 120 bp, synthetic construct; identical to SEQ ID NO: 2916
  source 1..120: mol_type = other DNA

SEQ ID NO: 2921 - DNA, 120 bp, synthetic construct
  source 1..120: mol_type = other DNA
aaaaataaaaatattaaattaaaacccaaatcttctaactacaaatctaaaacctataaccactatactacattttaacaattacaattttaaatattctaaacaaaatcttaacaaaac

SEQ ID NO: 2922 - DNA, 120 bp, synthetic construct
  source 1..120: mol_type = other DNA
ggaagtaggggtattgggttgaagtttaggttttttgattatagatttagaatttataattattgtgttatgttttagtagttgtgattttaaatattttaaatagagttttgatagagt

SEQ ID NO: 2923 - DNA, 120 bp, synthetic construct
  source 1..120: mol_type = other DNA
aaaaataaaaatattaaattaaaacccaaatcttctaactacaaatctaaaacctataaacaatatactacattttaacaattacaattttaaatattctaaacaaaatcttaacaaaac

SEQ ID NO: 2924 - DNA, 120 bp, synthetic construct
  source 1..120: mol_type = other DNA
ggaagtaggggtattgggttgaagtttaggttttttgattatagatttagaatttataagtagtgtgttatgttttagtagttgtgattttaaatattttaaatagagttttgatagagt

SEQ ID NO: 2925 - DNA, 120 bp, synthetic construct
  source 1..120: mol_type = other DNA
aaaaataaaaatattaaattaaaacccaaatcttctaactacaaatctaaaacctataaccactatactacgttttaacaattacgattttaaatattctaaacaaaatcttaacaaaac

SEQ ID NO: 2926 - DNA, 120 bp, synthetic construct
  source 1..120: mol_type = other DNA
ggaagtaggggtattgggttgaagtttaggttttttgattatagatttagaatttataattattgtgttacgttttagtagttgcgattttaaatattttaaatagagttttgatagagt

SEQ ID NO: 2927 - DNA, 120 bp, synthetic construct
  source 1..120: mol_type = other DNA
aaaaataaaaatattaaattaaaacccaaatcttctaactacaaatctaaaacctataaacaatatactacgttttaacaattacgattttaaatattctaaacaaaatcttaacaaaac

SEQ ID NO: 2928 - DNA, 120 bp, synthetic construct
  source 1..120: mol_type = other DNA
ggaagtaggggtattgggttgaagtttaggttttttgattatagatttagaatttataagtagtgtgttacgttttagtagttgcgattttaaatattttaaatagagttttgatagagt

SEQ ID NO: 2929 - DNA, 120 bp, synthetic construct
  source 1..120: mol_type = other DNA
ctaaatctccaaaacaaataacaccctcaaaaaacaacaaccaaaccctaaaatctaaaaaaatacctaccaaaatctactaatctaaaaaaacaaactattcaaccactattatcaccc

SEQ ID NO: 2930 - DNA, 120 bp, synthetic construct
  source 1..120: mol_type = other DNA
ttgagtttttagggtagatggtgtttttgggaagtagtaattaggttttagaatttgggggagtgtttgttagggtttattagtttagaggaatagattgtttagttgttgttgttattt

SEQ ID NO: 2931 - DNA, 120 bp, synthetic construct
  source 1..120: mol_type = other DNA
ctaaatctccaaaacaaataacaccctcaaaaaacaacaaccaaaccctaaaatctaaacaactacctaccaaaatctactaatctaaaaaaacaaactattcaaccactattatcaccc

SEQ ID NO: 2932 - DNA, 120 bp, synthetic construct
  source 1..120: mol_type = other DNA
ttgagtttttagggtagatggtgtttttgggaagtagtaattaggttttagaatttgggtgattgtttgttagggtttattagtttagaggaatagattgtttagttgttgttgttattt

SEQ ID NO: 2933 - DNA, 120 bp, synthetic construct
  source 1..120: mol_type = other DNA
ctaaatctccaaaacaaataacgccctcgaaaaacaacaaccaaaccctaaaatctaaaaaaatacctaccaaaatctactaatctaaaaaaacaaactattcaaccgctattatcaccc

SEQ ID NO: 2934 - DNA, 120 bp, synthetic construct
  source 1..120: mol_type = other DNA
ttgagtttttagggtagatggcgttttcgggaagtagtaattaggttttagaatttgggggagtgtttgttagggtttattagtttagaggaatagattgtttagtcgttgttgttattt

SEQ ID NO: 2935 - DNA, 120 bp, synthetic construct
  source 1..120: mol_type = other DNA
ctaaatctccaaaacaaataacgccctcgaaaaacaacaaccaaaccctaaaatctaaacgactacctaccaaaatctactaatctaaaaaaacaaactattcaaccgctattatcaccc

SEQ ID NO: 2936 - DNA, 120 bp, synthetic construct
  source 1..120: mol_type = other DNA
ttgagtttttagggtagatggcgttttcgggaagtagtaattaggttttagaatttgggcgattgtttgttagggtttattagtttagaggaatagattgtttagtcgttgttgttattt

SEQ ID NO: 2937 - DNA, 120 bp, synthetic construct
  source 1..120: mol_type = other DNA
ttacaaatatcaaaatattaaacatattaaaaacatctatactttaactcaactatataaaaaacccctcaaactaaataatttattcacacattaatacccttcaatcttcaataatat

SEQ ID NO: 2938 - DNA, 120 bp, synthetic construct
  source 1..120: mol_type = other DNA
ttgtaagtattagaatgttgggtatgttagaaatatttgtattttaatttagttgtgtagaaaattttttaaattgaataatttatttatatattggtgttttttaatttttagtaatat

SEQ ID NO: 2939 - DNA, 120 bp, synthetic construct
  source 1..120: mol_type = other DNA
ttacaaatatcaaaatattaaacatattaaaaacatctatactttaactcaactatttaaaaaacacctcaaactaaataatttattcacacattaatacccttcaatcttcaataatat

SEQ ID NO: 2940 - DNA, 120 bp, synthetic construct
  source 1..120: mol_type = other DNA
ttgtaagtattagaatgttgggtatgttagaaatatttgtattttaatttagttgtttagaaaatattttaaattgaataatttatttatatattggtgttttttaatttttagtaatat

SEQ ID NO: 2941 - DNA, 120 bp, synthetic construct; identical to SEQ ID NO: 2937
  source 1..120: mol_type = other DNA

SEQ ID NO: 2942 - DNA, 120 bp, synthetic construct; identical to SEQ ID NO: 2938
  source 1..120: mol_type = other DNA

SEQ ID NO: 2943 - DNA, 120 bp, synthetic construct; identical to SEQ ID NO: 2939
  source 1..120: mol_type = other DNA

SEQ ID NO: 2944 - DNA, 120 bp, synthetic construct; identical to SEQ ID NO: 2940
  source 1..120: mol_type = other DNA

SEQ ID NO: 2945 - DNA, 120 bp, synthetic construct
  source 1..120: mol_type = other DNA
aattaaataacatttttacaattatatacctacttttcaacacaaactattaaacacctttataacaatcaactaaaatcaataattattaacattttaccattttaatttatttatata

SEQ ID NO: 2946 - DNA, 120 bp, synthetic construct
  source 1..120: mol_type = other DNA
aattagatagtatttttgtagttatgtatttattttttaatataaattgttgaatatttttgtaataattaattagagttaatggttattaatattttgttattttagtttatttgtatg

SEQ ID NO: 2947 - DNA, 120 bp, synthetic construct
  source 1..120: mol_type = other DNA
aattaaataacatttttacaattatatacctacttttcaacacaaactattaaacaactttataccaatcaactaaaatcaataattattaacattttaccattttaatttatttatata

SEQ ID NO: 2948 - DNA, 120 bp, synthetic construct
  source 1..120: mol_type = other DNA
aattagatagtatttttgtagttatgtatttattttttaatataaattgttgaataattttgtattaattaattagagttaatggttattaatattttgttattttagtttatttgtatg

SEQ ID NO: 2949 - DNA, 120 bp, synthetic construct; identical to SEQ ID NO: 2945
  source 1..120: mol_type = other DNA

SEQ ID NO: 2950 - DNA, 120 bp, synthetic construct; identical to SEQ ID NO: 2946
  source 1..120: mol_type = other DNA

SEQ ID NO: 2951 - DNA, 120 bp, synthetic construct; identical to SEQ ID NO: 2947
  source 1..120: mol_type = other DNA

SEQ ID NO: 2952 - DNA, 120 bp, synthetic construct; identical to SEQ ID NO: 2948
  source 1..120: mol_type = other DNA

SEQ ID NO: 2953 - DNA, 120 bp, synthetic construct
  source 1..120: mol_type = other DNA
cattaataaccattaaataccccatatactaataaatataaaatcattcaaaaaaatacaaaaaaacttccccacctaaaaaaaaaattatcttctaccaataaacctaacaataataac

SEQ ID NO: 2954 - DNA, 120 bp, synthetic construct
  source 1..120: mol_type = other DNA
tattaataattattgaatgttttatgtattaatagatatgaaattatttagagaaatatgagaaagtttttttatttgaaggggaaattattttttattaataggtttaataataataat

SEQ ID NO: 2955 - DNA, 120 bp, synthetic construct
  source 1..120: mol_type = other DNA
cattaataaccattaaataccccatatactaataaatataaaatcattcaaaaaaataaaaaacaacttccccacctaaaaaaaaaattatcttctaccaataaacctaacaataataac

SEQ ID NO: 2956 - DNA, 120 bp, synthetic construct
  source 1..120: mol_type = other DNA
tattaataattattgaatgttttatgtattaatagatatgaaattatttagagaaataggagatagtttttttatttgaaggggaaattattttttattaataggtttaataataataat

SEQ ID NO: 2957 - DNA, 120 bp, synthetic construct
  source 1..120: mol_type = other DNA
cattaataaccattaaataccccatatactaataaatataaaatcattcaaaaaaatacgaaaaaacttccccacctaaaaaaaaaattatcttctaccaataaacctaacaataataac

SEQ ID NO: 2958 - DNA, 120 bp, synthetic construct
  source 1..120: mol_type = other DNA
tattaataattattgaatgttttatgtattaatagatatgaaattatttagagaaatacgagaaagtttttttatttgaaggggaaattattttttattaataggtttaataataataat

SEQ ID NO: 2959 - DNA, 120 bp, synthetic construct; identical to SEQ ID NO: 2955
  source 1..120: mol_type = other DNA

SEQ ID NO: 2960 - DNA, 120 bp, synthetic construct; identical to SEQ ID NO: 2956
  source 1..120: mol_type = other DNA

SEQ ID NO: 2961 - DNA, 120 bp, synthetic construct
  source 1..120: mol_type = other DNA
cataaatatttaattttataaaataatatatatttatatatatctctaaatacattccttaaaaaaattattataattttattaaaatataatttattaaaatatatatataaatacaca

SEQ ID NO: 2962 - DNA, 120 bp, synthetic construct
  source 1..120: mol_type = other DNA
tataagtatttgattttgtaagataatatatatttatgtgtatttttgggtatattttttagggaaattattatgattttattaaaatatagtttattgagatgtatatgtaggtatata

SEQ ID NO: 2963 - DNA, 120 bp, synthetic construct
  source 1..120: mol_type = other DNA
cataaatatttaattttataaaataatatatatttatatatatctctaaatacattccataaataaattattataattttattaaaatataatttattaaaatatatatataaatacaca

SEQ ID NO: 2964 - DNA, 120 bp, synthetic construct
  source 1..120: mol_type = other DNA
tataagtatttgattttgtaagataatatatatttatgtgtatttttgggtatattttgtaggtaaattattatgattttattaaaatatagtttattgagatgtatatgtaggtatata

SEQ ID NO: 2965 - DNA, 120 bp, synthetic construct; identical to SEQ ID NO: 2961
  source 1..120: mol_type = other DNA

SEQ ID NO: 2966 - DNA, 120 bp, synthetic construct; identical to SEQ ID NO: 2962
  source 1..120: mol_type = other DNA

SEQ ID NO: 2967 - DNA, 120 bp, synthetic construct
  source 1..120: mol_type = other DNA
cataaatatttaattttataaaataatatatatttatatatatctctaaatacattccgtaaataaattattataattttattaaaatataatttattaaaatatatatataaatacaca

SEQ ID NO: 2968 - DNA, 120 bp, synthetic construct
  source 1..120: mol_type = other DNA
tataagtatttgattttgtaagataatatatatttatgtgtatttttgggtatatttcgtaggtaaattattatgattttattaaaatatagtttattgagatgtatatgtaggtatata

SEQ ID NO: 2969 - DNA, 120 bp, synthetic construct
  source 1..120: mol_type = other DNA
aattaacaaaataattcataaaaccaccatacctaacctcatataaaacactttaccttacacttaaaaaataattaatattaaatattaatattaaaaataaaacaaatattaaaaaaa

SEQ ID NO: 2970 - DNA, 120 bp, synthetic construct
  source 1..120: mol_type = other DNA
aattagtgaagtaatttatgaggttattatgtttggttttatgtaaagtattttgttttgtatttagaaaataattaatattagatattagtattaagaatgaagtaaatgttagaaaag

SEQ ID NO: 2971 - DNA, 120 bp, synthetic construct
  source 1..120: mol_type = other DNA
aattaacaaaataattcataaaaccaccatacctaacctcatataaaacactttacctaacacataaaaaataattaatattaaatattaatattaaaaataaaacaaatattaaaaaaa

SEQ ID NO: 2972 - DNA, 120 bp, synthetic construct
  source 1..120: mol_type = other DNA
aattagtgaagtaatttatgaggttattatgtttggttttatgtaaagtattttgtttagtatatagaaaataattaatattagatattagtattaagaatgaagtaaatgttagaaaag

SEQ ID NO: 2973 - DNA, 120 bp, synthetic construct
  source 1..120: mol_type = other DNA
aattaacgaaataattcataaaaccaccatacctaacctcatataaaacactttaccttacacttaaaaaataattaatattaaatattaatattaaaaataaaacaaatattaaaaaaa

SEQ ID NO: 2974 - DNA, 120 bp, synthetic construct
  source 1..120: mol_type = other DNA
aattagcgaagtaatttatgaggttattatgtttggttttatgtaaagtattttgttttgtatttagaaaataattaatattagatattagtattaagaatgaagtaaatgttagaaaag

SEQ ID NO: 2975 - DNA, 120 bp, synthetic construct
  source 1..120: mol_type = other DNA
aattaacgaaataattcataaaaccaccatacctaacctcatataaaacactttacctaacacataaaaaataattaatattaaatattaatattaaaaataaaacaaatattaaaaaaa

SEQ ID NO: 2976 - DNA, 120 bp, synthetic construct
  source 1..120: mol_type = other DNA
aattagcgaagtaatttatgaggttattatgtttggttttatgtaaagtattttgtttagtatatagaaaataattaatattagatattagtattaagaatgaagtaaatgttagaaaag

SEQ ID NO: 2977 - DNA, 120 bp, synthetic construct
  source 1..120: mol_type = other DNA
caaaaaccttaacaataacctataaatctccacaacatcttacccttttcctttaatacccaaattacacatcctattactctctaaactacatactctatctcactacactaaacttat

SEQ ID NO: 2978 - DNA, 120 bp, synthetic construct
  source 1..120: mol_type = other DNA
taaaggttttaataatggtttgtaagtttttatagtattttattttttttttttaatgtttagattgtatattttattattttttgaattgtatattttgttttattatattggatttgt

SEQ ID NO: 2979 - DNA, 120 bp, synthetic construct
  source 1..120: mol_type = other DNA
caaaaaccttaacaataacctataaatctccacaacatcttacccttttcctttaatacactaattacacatcctattactctctaaactacatactctatctcactacactaaacttat

SEQ ID NO: 2980 - DNA, 120 bp, synthetic construct
  source 1..120: mol_type = other DNA
taaaggttttaataatggtttgtaagtttttatagtattttattttttttttttaatgtgttgattgtatattttattattttttgaattgtatattttgttttattatattggatttgt

SEQ ID NO: 2981 - DNA, 120 bp, synthetic construct; identical to SEQ ID NO: 2977
  source 1..120: mol_type = other DNA

SEQ ID NO: 2982 - DNA, 120 bp, synthetic construct; identical to SEQ ID NO: 2978
  source 1..120: mol_type = other DNA

SEQ ID NO: 2983 - DNA, 120 bp, synthetic construct
  source 1..120: mol_type = other DNA
caaaaaccttaacaataacctataaatctccacaacatcttacccttttcctttaatacgctaattacacatcctattactctctaaactacatactctatctcactacactaaacttat

SEQ ID NO: 2984 - DNA, 120 bp, synthetic construct
  source 1..120: mol_type = other DNA
taaaggttttaataatggtttgtaagtttttatagtattttattttttttttttaatgcgttgattgtatattttattattttttgaattgtatattttgttttattatattggatttgt

SEQ ID NO: 2985 - DNA, 120 bp, synthetic construct
  source 1..120: mol_type = other DNA
tatttacataaaaataatatcaaattaccactctcttacttataatataaaacaatttaataaaacaaaaaatatcatcatataatccaacacaacacacacataatacaatatttctca

SEQ ID NO: 2986 - DNA, 120 bp, synthetic construct
  source 1..120: mol_type = other DNA
tgtttgtataaaaataatattaaattattatttttttgtttatggtataaagtagtttgatgggatagaaagtgttattatatggtttagtatggtatatatgtgatatggtgtttttta

SEQ ID NO: 2987 - DNA, 120 bp, synthetic construct
  source 1..120: mol_type = other DNA
tatttacataaaaataatatcaaattaccactctcttacttataatataaaacaattaaataaaccaaaaaatatcatcatataatccaacacaacacacacataatacaatatttctca

SEQ ID NO: 2988 - DNA, 120 bp, synthetic construct
  source 1..120: mol_type = other DNA
tgtttgtataaaaataatattaaattattatttttttgtttatggtataaagtagttggatgggttagaaagtgttattatatggtttagtatggtatatatgtgatatggtgtttttta

SEQ ID NO: 2989 - DNA, 120 bp, synthetic construct
  source 1..120: mol_type = other DNA
tatttacataaaaataatatcaaattaccactctcttacttataatataaaacaatttaataaaacaaaaaatatcatcatataatccaacacgacacacacgtaatacgatatttctca

SEQ ID NO: 2990 - DNA, 120 bp, synthetic construct
  source 1..120: mol_type = other DNA
tgtttgtataaaaataatattaaattattatttttttgtttatggtataaagtagtttgatgggatagaaagtgttattatatggtttagtacggtatatacgtgatacggtgtttttta

SEQ ID NO: 2991 - DNA, 120 bp, synthetic construct
  source 1..120: mol_type = other DNA
tatttacataaaaataatatcaaattaccactctcttacttataatataaaacaattaaataaaccaaaaaatatcatcatataatccaacacgacacacacgtaatacgatatttctca

SEQ ID NO: 2992 - DNA, 120 bp, synthetic construct
  source 1..120: mol_type = other DNA
tgtttgtataaaaataatattaaattattatttttttgtttatggtataaagtagttggatgggttagaaagtgttattatatggtttagtacggtatatacgtgatacggtgtttttta

SEQ ID NO: 2993 - DNA, 120 bp, synthetic construct
  source 1..120: mol_type = other DNA
ttacatctcaatttaaacactaaaatctaatataacactaaacaatcactaatacctacacccaacattctcactatttataaaaaataaaacaaaaaaatctcaaaataatatttaaaa

SEQ ID NO: 2994 - DNA, 120 bp, synthetic construct
  source 1..120: mol_type = other DNA
ttatattttagtttgaatattaaaatttggtatagtattgagtaattattgatatttgtatttagtatttttattgtttatggaagatgaaatagaaaagttttaaaataatgtttgaaa

SEQ ID NO: 2995 - DNA, 120 bp, synthetic construct
  source 1..120: mol_type = other DNA
ttacatctcaatttaaacactaaaatctaatataacactaaacaatcactaatacctccaccctacattctcactatttataaaaaataaaacaaaaaaatctcaaaataatatttaaaa

SEQ ID NO: 2996 - DNA, 120 bp, synthetic construct
  source 1..120: mol_type = other DNA
ttatattttagtttgaatattaaaatttggtatagtattgagtaattattgatatttttattttgtatttttattgtttatggaagatgaaatagaaaagttttaaaataatgtttgaaa

SEQ ID NO: 2997 - DNA, 120 bp, synthetic construct; identical to SEQ ID NO: 2993
  source 1..120: mol_type = other DNA

SEQ ID NO: 2998 - DNA, 120 bp, synthetic construct; identical to SEQ ID NO: 2994
  source 1..120: mol_type = other DNA

SEQ ID NO: 2999 - DNA, 120 bp, synthetic construct; identical to SEQ ID NO: 2995
  source 1..120: mol_type = other DNA

SEQ ID NO: 3000 - DNA, 120 bp, synthetic construct; identical to SEQ ID NO: 2996
  source 1..120: mol_type = other DNA

SEQ ID NO: 3001 - DNA, 120 bp, synthetic construct
  source 1..120: mol_type = other DNA
tttactattttaataaaaaattaatttacctaaatcaaaaacatcaatttaataaaacaaatatatatataaacacatataaaaaactcaaaattactaaaaaaaatttataaaaaaaaa

SEQ ID NO: 3002 - DNA, 120 bp, synthetic construct
  source 1..120: mol_type = other DNA
tttattattttagtaagaaattagtttatttgagttaaaaatattaatttagtggagtaaatatatatgtgaatatatgtaggaagtttagagttattgggagagatttatagaaagagg

SEQ ID NO: 3003 - DNA, 120 bp, synthetic construct
  source 1..120: mol_type = other DNA
tttactattttaataaaaaattaatttacctaaatcaaaaacatcaatttaataaaaaaaataaatatataaacacatataaaaaactcaaaattactaaaaaaaatttataaaaaaaaa

SEQ ID NO: 3004 - DNA, 120 bp, synthetic construct
  source 1..120: mol_type = other DNA
tttattattttagtaagaaattagtttatttgagttaaaaatattaatttagtggaggaaatagatatgtgaatatatgtaggaagtttagagttattgggagagatttatagaaagagg

SEQ ID NO: 3005 - DNA, 120 bp, synthetic construct; identical to SEQ ID NO: 3001
  source 1..120: mol_type = other DNA

SEQ ID NO: 3006 - DNA, 120 bp, synthetic construct; identical to SEQ ID NO: 3002
  source 1..120: mol_type = other DNA

SEQ ID NO: 3007 - DNA, 120 bp, synthetic construct; identical to SEQ ID NO: 3003
  source 1..120: mol_type = other DNA

SEQ ID NO: 3008 - DNA, 120 bp, synthetic construct; identical to SEQ ID NO: 3004
  source 1..120: mol_type = other DNA

SEQ ID NO: 3009 - DNA, 120 bp, synthetic construct
  source 1..120: mol_type = other DNA
atctatacaattaaaacataacactttactataacttaacattaattatctttcttaacacaaaaaaataaaatttaaaacaatactttaaaaaatattaacataaaatacaatcttttc

SEQ ID NO: 3010 - DNA, 120 bp, synthetic construct
  source 1..120: mol_type = other DNA
atttgtataattggaatataatattttattgtggtttagtattaattgttttttttagtatagaaaaatagaatttaaaataatgttttgaagaatattaatatgaagtgtagttttttt

SEQ ID NO: 3011 - DNA, 120 bp, synthetic construct
  source 1..120: mol_type = other DNA
atctatacaattaaaacataacactttactataacttaacattaattatctttcttaccacaaacaaataaaatttaaaacaatactttaaaaaatattaacataaaatacaatcttttc

SEQ ID NO: 3012 - DNA, 120 bp, synthetic construct
  source 1..120: mol_type = other DNA
atttgtataattggaatataatattttattgtggtttagtattaattgttttttttattatagataaatagaatttaaaataatgttttgaagaatattaatatgaagtgtagttttttt

SEQ ID NO: 3013 - DNA, 120 bp, synthetic construct; identical to SEQ ID NO: 3009
  source 1..120: mol_type = other DNA

SEQ ID NO: 3014 - DNA, 120 bp, synthetic construct; identical to SEQ ID NO: 3010
  source 1..120: mol_type = other DNA

SEQ ID NO: 3015 - DNA, 120 bp, synthetic construct; identical to SEQ ID NO: 3011
  source 1..120: mol_type = other DNA

SEQ ID NO: 3016 - DNA, 120 bp, synthetic construct; identical to SEQ ID NO: 3012
  source 1..120: mol_type = other DNA

SEQ ID NO: 3017 - DNA, 120 bp, synthetic construct
  source 1..120: mol_type = other DNA
cactaaatcaaaatctaatatataatactctacccccaataaatacttcatataaatccaaacaaaaaaacacaaatccaaaaacccaaaaattaaaattaactacttctcaccatcatt

SEQ ID NO: 3018 - DNA, 120 bp, synthetic construct
  source 1..120: mol_type = other DNA
tattgaattagagtttaatatatggtgttttgtttttagtagatattttatgtggatttaagtagaaagatataggtttaggaatttaagggttgggattagttattttttattattatt

SEQ ID NO: 3019 - DNA, 120 bp, synthetic construct
  source 1..120: mol_type = other DNA
cactaaatcaaaatctaatatataatactctacccccaataaatacttcatataaatcaaaaaaaaaaaacacaaatccaaaaacccaaaaattaaaattaactacttctcaccatcatt

SEQ ID NO: 3020 - DNA, 120 bp, synthetic construct
  source 1..120: mol_type = other DNA
tattgaattagagtttaatatatggtgttttgtttttagtagatattttatgtggattgaagaagaaagatataggtttaggaatttaagggttgggattagttattttttattattatt

SEQ ID NO: 3021 - DNA, 120 bp, synthetic construct; identical to SEQ ID NO: 3017
  source 1..120: mol_type = other DNA

SEQ ID NO: 3022 - DNA, 120 bp, synthetic construct; identical to SEQ ID NO: 3018
  source 1..120: mol_type = other DNA

SEQ ID NO: 3023 - DNA, 120 bp, synthetic construct
  source 1..120: mol_type = other DNA
cactaaatcaaaatctaatatataatactctacccccaataaatacttcatataaatcgaaaaaaaaaaacacaaatccaaaaacccaaaaattaaaattaactacttctcaccatcatt

SEQ ID NO: 3024 - DNA, 120 bp, synthetic construct
  source 1..120: mol_type = other DNA
tattgaattagagtttaatatatggtgttttgtttttagtagatattttatgtggatcgaagaagaaagatataggtttaggaatttaagggttgggattagttattttttattattatt

SEQ ID NO: 3025 - DNA, 120 bp, synthetic construct
  source 1..120: mol_type = other DNA
ctccatctaatttaataattccctattaaacaaacaaaacaaaaaaaattatatcaattatatcaacaactaactaacattcattaatttattaaaaaactatatataccaatacataac

SEQ ID NO: 3026 - DNA, 120 bp, synthetic construct
  source 1..120: mol_type = other DNA
ttttatttagtttgataattttttattgagtgagtagagtagggaaggttgtgttagttatattaataattagttagtatttattagtttattgagagattatatgtgttagtatatggt

SEQ ID NO: 3027 - DNA, 120 bp, synthetic construct
  source 1..120: mol_type = other DNA
ctccatctaatttaataattccctattaaacaaacaaaacaaaaaaaattatatcaataataacaacaactaactaacattcattaatttattaaaaaactatatataccaatacataac

SEQ ID NO: 3028 - DNA, 120 bp, synthetic construct
  source 1..120: mol_type = other DNA
ttttatttagtttgataattttttattgagtgagtagagtagggaaggttgtgttagtaatagtaataattagttagtatttattagtttattgagagattatatgtgttagtatatggt

SEQ ID NO: 3029 - DNA, 120 bp, synthetic construct
  source 1..120: mol_type = other DNA
ctccatctaatttaataattccctattaaacgaacaaaacaaaaaaaattatatcaattatatcaacaactaactaacattcattaatttattaaaaaactatatataccaatacataac

SEQ ID NO: 3030 - DNA, 120 bp, synthetic construct
  source 1..120: mol_type = other DNA
ttttatttagtttgataattttttattgagcgagtagagtagggaaggttgtgttagttatattaataattagttagtatttattagtttattgagagattatatgtgttagtatatggt

SEQ ID NO: 3031 - DNA, 120 bp, synthetic construct
  source 1..120: mol_type = other DNA
ctccatctaatttaataattccctattaaacgaacaaaacaaaaaaaattatatcaataataacaacaactaactaacattcattaatttattaaaaaactatatataccaatacataac

SEQ ID NO: 3032 - DNA, 120 bp, synthetic construct
  source 1..120: mol_type = other DNA
ttttatttagtttgataattttttattgagcgagtagagtagggaaggttgtgttagtaatagtaataattagttagtatttattagtttattgagagattatatgtgttagtatatggt

SEQ ID NO: 3033 - DNA, 120 bp, synthetic construct
  source 1..120: mol_type = other DNA
taaccctctcatccttacatcatctacccttaaaaaacaacctacctacaatcacctcacaacccctaataaaaatattacccacaacctttttctacatattttcaaacacacaaatca

SEQ ID NO: 3034 - DNA, 120 bp, synthetic construct
  source 1..120: mol_type = other DNA
tggtttttttatttttatattatttgtttttgagaagtaatttgtttatgattattttataatttttgatagaaatgttgtttatagtttttttttatatgtttttaagtatataaatta

SEQ ID NO: 3035 - DNA, 120 bp, synthetic construct
  source 1..120: mol_type = other DNA
taaccctctcatccttacatcatctacccttaaaaaacaacctacctacaatcacctcccaaaccctaataaaaatattacccacaacctttttctacatattttcaaacacacaaatca

SEQ ID NO: 3036 - DNA, 120 bp, synthetic construct
  source 1..120: mol_type = other DNA
tggtttttttatttttatattatttgtttttgagaagtaatttgtttatgattattttttaaattttgatagaaatgttgtttatagtttttttttatatgtttttaagtatataaatta

SEQ ID NO: 3037 - DNA, 120 bp, synthetic construct
  source 1..120: mol_type = other DNA
taaccctctcatccttacatcatctacccttaaaaaacaacctacctacgatcacctcacaacccctaataaaaatattacccacaacctttttctacatattttcaaacacacaaatca

SEQ ID NO: 3038 - DNA, 120 bp, synthetic construct
  source 1..120: mol_type = other DNA
tggtttttttatttttatattatttgtttttgagaagtaatttgtttacgattattttataatttttgatagaaatgttgtttatagtttttttttatatgtttttaagtatataaatta

SEQ ID NO: 3039 - DNA, 120 bp, synthetic construct
  source 1..120: mol_type = other DNA
taaccctctcatccttacatcatctacccttaaaaaacaacctacctacgatcacctcccaaaccctaataaaaatattacccacaacctttttctacatattttcaaacacacaaatca

SEQ ID NO: 3040 - DNA, 120 bp, synthetic construct
  source 1..120: mol_type = other DNA
tggtttttttatttttatattatttgtttttgagaagtaatttgtttacgattattttttaaattttgatagaaatgttgtttatagtttttttttatatgtttttaagtatataaatta

SEQ ID NO: 3041 - DNA, 120 bp, synthetic construct
  source 1..120: mol_type = other DNA
caaacctataaacacaaaaccaacataaaaacccactctttcttactatctctctaaaatacataaaaataaacaaaaaaaatttcaactaatcataacaaataccaaattattcaaaaa

SEQ ID NO: 3042 - DNA, 120 bp, synthetic construct
  source 1..120: mol_type = other DNA
tagatttgtaaatataaagttggtatgagaatttatttttttttattgtttttttgaagtatatagagataaataaaagaaattttaattaattatgataagtattaaattatttaagag

SEQ ID NO: 3043 - DNA, 120 bp, synthetic construct
  source 1..120: mol_type = other DNA
caaacctataaacacaaaaccaacataaaaacccactctttcttactatctctcttaaatacatacaaataaacaaaaaaaatttcaactaatcataacaaataccaaattattcaaaaa

SEQ ID NO: 3044 - DNA, 120 bp, synthetic construct
  source 1..120: mol_type = other DNA
tagatttgtaaatataaagttggtatgagaatttatttttttttattgttttttttaagtatatatagataaataaaagaaattttaattaattatgataagtattaaattatttaagag

SEQ ID NO: 3045 - DNA, 120 bp, synthetic construct
  source 1..120: mol_type = other DNA
caaacctataaacacaaaaccgacataaaaacccactctttcttactatctctctaaaatacataaaaataaacaaaaaaaatttcaactaatcataacaaataccaaattattcaaaaa

SEQ ID NO: 3046 - DNA, 120 bp, synthetic construct
  source 1..120: mol_type = other DNA
tagatttgtaaatataaagtcggtatgagaatttatttttttttattgtttttttgaagtatatagagataaataaaagaaattttaattaattatgataagtattaaattatttaagag

SEQ ID NO: 3047 - DNA, 120 bp, synthetic construct
  source 1..120: mol_type = other DNA
caaacctataaacacaaaaccgacataaaaacccactctttcttactatctctcttaaatacatacaaataaacaaaaaaaatttcaactaatcataacaaataccaaattattcaaaaa

SEQ ID NO: 3048 - DNA, 120 bp, synthetic construct
  source 1..120: mol_type = other DNA
tagatttgtaaatataaagtcggtatgagaatttatttttttttattgttttttttaagtatatatagataaataaaagaaattttaattaattatgataagtattaaattatttaagag

SEQ ID NO: 3049 - DNA, 120 bp, synthetic construct
  source 1..120: mol_type = other DNA
taaataacaattcttaaaatataacactaaataaactaaaataaaaaaaaaaactaccccattcctaaaaaaaaaacaaatactattaacaacaaaaccaccaaataaaaaatacttaat

SEQ ID NO: 3050 - DNA, 120 bp, synthetic construct
  source 1..120: mol_type = other DNA
taaatgatagtttttaaaatgtgatattggataagttgaggtgagagggaggattgttttatttttgggaaaaaggtaaatgttgttgatagtaaagttgttagatgaaagatgtttaat

SEQ ID NO: 3051 - DNA, 120 bp, synthetic construct
  source 1..120: mol_type = other DNA
taaataacaattcttaaaatataacactaaataaactaaaataaaaaaaaaaactcccccattccaaaaaaaaaaacaaatactattaacaacaaaaccaccaaataaaaaatacttaat

SEQ ID NO: 3052 - DNA, 120 bp, synthetic construct
  source 1..120: mol_type = other DNA
taaatgatagtttttaaaatgtgatattggataagttgaggtgagagggaggatttttttattttagggaaaaaggtaaatgttgttgatagtaaagttgttagatgaaagatgtttaat

SEQ ID NO: 3053 - DNA, 120 bp, synthetic construct
  source 1..120: mol_type = other DNA
taaataacaattcttaaaatataacactaaataaactaaaataaaaaaaaaaactaccccattcctaaaaaaaaaacaaatactattaacaacaaaaccgccaaataaaaaatacttaat

SEQ ID NO: 3054 - DNA, 120 bp, synthetic construct
  source 1..120: mol_type = other DNA
taaatgatagtttttaaaatgtgatattggataagttgaggtgagagggaggattgttttatttttgggaaaaaggtaaatgttgttgatagtaaagtcgttagatgaaagatgtttaat

SEQ ID NO: 3055 - DNA, 120 bp, synthetic construct
  source 1..120: mol_type = other DNA
taaataacaattcttaaaatataacactaaataaactaaaataaaaaaaaaaactcccccattccaaaaaaaaaaacaaatactattaacaacaaaaccgccaaataaaaaatacttaat

SEQ ID NO: 3056 - DNA, 120 bp, synthetic construct
  source 1..120: mol_type = other DNA
taaatgatagtttttaaaatgtgatattggataagttgaggtgagagggaggatttttttattttagggaaaaaggtaaatgttgttgatagtaaagtcgttagatgaaagatgtttaat

SEQ ID NO: 3057 - DNA, 120 bp, synthetic construct
  source 1..120: mol_type = other DNA
cataaaaacacaaactcttttaatttatttacaacaatatccccaactcctaaaaccatatctaatactattcaatttatctaataattaaatcaatcaattctcaatactaatattcac

SEQ ID NO: 3058 - DNA, 120 bp, synthetic construct
  source 1..120: mol_type = other DNA
tatgagagtataagtttttttggtttgtttatagtagtgtttttagtttttaaaattatgtttagtattatttaatttgtttaataattggattgattaatttttagtattagtatttat

SEQ ID NO: 3059 - DNA, 120 bp, synthetic construct
  source 1..120: mol_type = other DNA
cataaaaacacaaactcttttaatttatttacaacaatatccccaactcctaaaaccataaataatactattcaatttatctaataattaaatcaatcaattctcaatactaatattcac

SEQ ID NO: 3060 - DNA, 120 bp, synthetic construct
  source 1..120: mol_type = other DNA
tatgagagtataagtttttttggtttgtttatagtagtgtttttagtttttaaaattatgaatagtattatttaatttgtttaataattggattgattaatttttagtattagtatttat

SEQ ID NO: 3061 - DNA, 120 bp, synthetic construct
  source 1..120: mol_type = other DNA
cataaaaacacaaactcttttaatttatttacaacaatatccccaactcctaaaaccatatctaatactattcaatttatctaataattaaatcgatcaattctcaatactaatattcac

SEQ ID NO: 3062 - DNA, 120 bp, synthetic construct
  source 1..120: mol_type = other DNA
tatgagagtataagtttttttggtttgtttatagtagtgtttttagtttttaaaattatgtttagtattatttaatttgtttaataattggatcgattaatttttagtattagtatttat

SEQ ID NO: 3063 - DNA, 120 bp, synthetic construct
  source 1..120: mol_type = other DNA
cataaaaacacaaactcttttaatttatttacaacaatatccccaactcctaaaaccataaataatactattcaatttatctaataattaaatcgatcaattctcaatactaatattcac

SEQ ID NO: 3064 - DNA, 120 bp, synthetic construct
  source 1..120: mol_type = other DNA
tatgagagtataagtttttttggtttgtttatagtagtgtttttagtttttaaaattatgaatagtattatttaatttgtttaataattggatcgattaatttttagtattagtatttat

SEQ ID NO: 3065 - DNA, 120 bp, synthetic construct
  source 1..120: mol_type = other DNA
cacaataaattaccaccaaatattaatatccaaaattcctttaaaccataaattaatattctcaaaatttactttaccctaaattattataattttactataattctacttaactacaat

SEQ ID NO: 3066 - DNA, 120 bp, synthetic construct
  source 1..120: mol_type = other DNA
tataatggattattattagatattaatatttgaggtttttttaaattatgagttggtatttttaaagtttgttttattttagattgttgtgattttattatagttttatttgattgtaat

SEQ ID NO: 3067 - DNA, 120 bp, synthetic construct
  source 1..120: mol_type = other DNA
cacaataaattaccaccaaatattaatatccaaaattcctttaaaccataaattaatattaacaaaatttactttaccctaaattattataattttactataattctacttaactacaat

SEQ ID NO: 3068 - DNA, 120 bp, synthetic construct
  source 1..120: mol_type = other DNA
tataatggattattattagatattaatatttgaggtttttttaaattatgagttggtattaataaagtttgttttattttagattgttgtgattttattatagttttatttgattgtaat

SEQ ID NO: 3069 - DNA, 120 bp, synthetic construct
  source 1..120: mol_type = other DNA
cacaataaattaccaccaaatattaatatccgaaattcctttaaaccataaattaatattctcaaaatttactttaccctaaattattataattttactataattctacttaactacaat

SEQ ID NO: 3070 - DNA, 120 bp, synthetic construct
  source 1..120: mol_type = other DNA
tataatggattattattagatattaatattcgaggtttttttaaattatgagttggtatttttaaagtttgttttattttagattgttgtgattttattatagttttatttgattgtaat

SEQ ID NO: 3071 - DNA, 120 bp, synthetic construct
  source 1..120: mol_type = other DNA
cacaataaattaccaccaaatattaatatccgaaattcctttaaaccataaattaatattaacaaaatttactttaccctaaattattataattttactataattctacttaactacaat

SEQ ID NO: 3072 - DNA, 120 bp, synthetic construct
  source 1..120: mol_type = other DNA
tataatggattattattagatattaatattcgaggtttttttaaattatgagttggtattaataaagtttgttttattttagattgttgtgattttattatagttttatttgattgtaat

SEQ ID NO: 3073 - DNA, 120 bp, synthetic construct
  source 1..120: mol_type = other DNA
tatcaaacacttactaaaataactaataaaactctcccaccaaaattttctaaatatttcaaaaattattcaaattttttaaacccactaaaaacataatatcaaatatttatcttctac

SEQ ID NO: 3074 - DNA, 120 bp, synthetic construct
  source 1..120: mol_type = other DNA
tgttaagtatttattaagataattaatgaaatttttttattaagattttttggatattttggaagttatttagattttttgaatttgttgagggtatagtgttagatgtttgttttttat

SEQ ID NO: 3075 - DNA, 120 bp, synthetic construct
  source 1..120: mol_type = other DNA
tatcaaacacttactaaaataactaataaaactctcccaccaaaattttctaaatatttcccaaattattcaaattttttaaacccactaaaaacataatatcaaatatttatcttctac

SEQ ID NO: 3076 - DNA, 120 bp, synthetic construct
  source 1..120: mol_type = other DNA
tgttaagtatttattaagataattaatgaaatttttttattaagattttttggatattttttaagttatttagattttttgaatttgttgagggtatagtgttagatgtttgttttttat

SEQ ID NO: 3077 - DNA, 120 bp, synthetic construct
  source 1..120: mol_type = other DNA
tatcaaacacttactaaaataactaataaaactctcccaccaaaattttctaaatatttcgaaaattattcaaattttttaaacccgctaaaaacataatatcaaatatttatcttctac

SEQ ID NO: 3078 - DNA, 120 bp, synthetic construct
  source 1..120: mol_type = other DNA
tgttaagtatttattaagataattaatgaaatttttttattaagattttttggatatttcggaagttatttagattttttgaattcgttgagggtatagtgttagatgtttgttttttat

SEQ ID NO: 3079 - DNA, 120 bp, synthetic construct
  source 1..120: mol_type = other DNA
tatcaaacacttactaaaataactaataaaactctcccaccaaaattttctaaatatttcccaaattattcaaattttttaaacccgctaaaaacataatatcaaatatttatcttctac

SEQ ID NO: 3080 - DNA, 120 bp, synthetic construct
  source 1..120: mol_type = other DNA
tgttaagtatttattaagataattaatgaaatttttttattaagattttttggatattttttaagttatttagattttttgaattcgttgagggtatagtgttagatgtttgttttttat

SEQ ID NO: 3081 - DNA, 120 bp, synthetic construct
  source 1..120: mol_type = other DNA
aaaaatttaaaaaaccaaaaaaccctcaactaatctttattctattccaactacatactcacttctttaaaaccaaaaacatctatataaattacccaacccattttcctaattttccaa

SEQ ID NO: 3082 - DNA, 120 bp, synthetic construct
  source 1..120: mol_type = other DNA
aggagtttagggagttagagggtttttagttggtttttattttgttttaattatatgtttatttttttagaattagaagtatttatataggttatttagtttatttttttggttttttag

SEQ ID NO: 3083 - DNA, 120 bp, synthetic construct
  source 1..120: mol_type = other DNA
aaaaatttaaaaaaccaaaaaaccctcaactaatctttattctattccaactacatactctattctttaaaaccaaaaacatctatataaattacccaacccattttcctaattttccaa

SEQ ID NO: 3084 - DNA, 120 bp, synthetic construct
  source 1..120: mol_type = other DNA
aggagtttagggagttagagggtttttagttggtttttattttgttttaattatatgttttgttttttagaattagaagtatttatataggttatttagtttatttttttggttttttag

SEQ ID NO: 3085 - DNA, 120 bp, synthetic construct; identical to SEQ ID NO: 3081
  source 1..120: mol_type = other DNA

SEQ ID NO: 3086 - DNA, 120 bp, synthetic construct; identical to SEQ ID NO: 3082
  source 1..120: mol_type = other DNA

SEQ ID NO: 3087 - DNA, 120 bp, synthetic construct; identical to SEQ ID NO: 3083
  source 1..120: mol_type = other DNA

SEQ ID NO: 3088 - DNA, 120 bp, synthetic construct; identical to SEQ ID NO: 3084
  source 1..120: mol_type = other DNA

SEQ ID NO: 3089 - DNA, 120 bp, synthetic construct
  source 1..120: mol_type = other DNA
taaccaatcttattaataaaaaacctcaatatacacctcttctttttcccatcccaaaacaaaaatttaaaatccaactcccactctctctcacttaaatctctttataaattacaatat

SEQ ID NO: 3090 - DNA, 120 bp, synthetic construct
  source 1..120: mol_type = other DNA
tggttagttttgttggtggaaaattttagtgtatgtttttttttttttttattttaagataggagtttgaggtttagtttttatttttttttatttgggtttttttgtgaattataatat

SEQ ID NO: 3091 - DNA, 120 bp, synthetic construct
  source 1..120: mol_type = other DNA
taaccaatcttattaataaaaaacctcaatatacacctcttctttttcccatcccaaaacccaaatttaaaatccaactcccactctctctcacttaaatctctttataaattacaatat

SEQ ID NO: 3092 - DNA, 120 bp, synthetic construct
  source 1..120: mol_type = other DNA
tggttagttttgttggtggaaaattttagtgtatgtttttttttttttttattttaagatttgagtttgaggtttagtttttatttttttttatttgggtttttttgtgaattataatat

SEQ ID NO: 3093 - DNA, 120 bp, synthetic construct
  source 1..120: mol_type = other DNA
taaccaatcttattaataaaaaacctcaatatacgcctcttctttttcccatcccaaaacaaaaatttaaaatccaactcccactctctctcacttaaatctctttataaattacaatat

SEQ ID NO: 3094 - DNA, 120 bp, synthetic construct
  source 1..120: mol_type = other DNA
tggttagttttgttggtggaaaattttagtgtacgtttttttttttttttattttaagataggagtttgaggtttagtttttatttttttttatttgggtttttttgtgaattataatat

SEQ ID NO: 3095 - DNA, 120 bp, synthetic construct
  source 1..120: mol_type = other DNA
taaccaatcttattaataaaaaacctcaatatacgcctcttctttttcccatcccaaaacccgaatttaaaatccaactcccactctctctcacttaaatctctttataaattacaatat

SEQ ID NO: 3096 - DNA, 120 bp, synthetic construct
  source 1..120: mol_type = other DNA
tggttagttttgttggtggaaaattttagtgtacgtttttttttttttttattttaagattcgagtttgaggtttagtttttatttttttttatttgggtttttttgtgaattataatat

SEQ ID NO: 3097 - DNA, 120 bp, synthetic construct
  source 1..120: mol_type = other DNA
ctaacccaccaacaaaaacacaaaaaaaaaccaaaaactaactttaattcaattacaaatatcccaattaattctatccataaaatctatcaataactaaacctaacaatatatacctct

SEQ ID NO: 3098 - DNA, 120 bp, synthetic construct
  source 1..120: mol_type = other DNA
ttgatttattagtagaagtataaaagagaattagggattggttttggtttgattgtgagtgttttagttagttttgtttatgaagtttgttaatgattgggtttaataatgtgtgttttt

SEQ ID NO: 3099 - DNA, 120 bp, synthetic construct
  source 1..120: mol_type = other DNA
ctaacccaccaacaaaaacacaaaaaaaaaccaaaaactaactttaattcaattacaaattacccaattaattctatccataaaatctatcaataactaaacctaacaatatatacctct

SEQ ID NO: 3100 - DNA, 120 bp, synthetic construct
  source 1..120: mol_type = other DNA
ttgatttattagtagaagtataaaagagaattagggattggttttggtttgattgtgagttatttagttagttttgtttatgaagtttgttaatgattgggtttaataatgtgtgttttt

SEQ ID NO: 3101 - DNA, 120 bp, synthetic construct
  source 1..120: mol_type = other DNA
ctaacccaccaacaaaaacacaaaaaaaaaccaaaaactaactttaattcgattacgaatatcccaattaattctatccataaaatctatcaataactaaacctaacaatatatacctct

SEQ ID NO: 3102 - DNA, 120 bp, synthetic construct
  source 1..120: mol_type = other DNA
ttgatttattagtagaagtataaaagagaattagggattggttttggttcgattgcgagtgttttagttagttttgtttatgaagtttgttaatgattgggtttaataatgtgtgttttt

SEQ ID NO: 3103 - DNA, 120 bp, synthetic construct
  source 1..120: mol_type = other DNA
ctaacccaccaacaaaaacacaaaaaaaaaccaaaaactaactttaattcgattacgaattacccaattaattctatccataaaatctatcaataactaaacctaacaatatatacctct

SEQ ID NO: 3104 - DNA, 120 bp, synthetic construct
  source 1..120: mol_type = other DNA
ttgatttattagtagaagtataaaagagaattagggattggttttggttcgattgcgagttatttagttagttttgtttatgaagtttgttaatgattgggtttaataatgtgtgttttt

SEQ ID NO: 3105 - DNA, 120 bp, synthetic construct
  source 1..120: mol_type = other DNA
acaattatataacccccaatccttccctatcctacacaacataaaaactacatctttataaaaactctctaaattaaataaaaaaaacttctaataaaattaatcaacataaaattttat

SEQ ID NO: 3106 - DNA, 120 bp, synthetic construct
  source 1..120: mol_type = other DNA
ataattgtgtagtttttaatttttttttattttatataatatgaaagttatatttttgtgagagttttttaagttggatggaagaagtttttgataaaattgattagtatggaattttgt

SEQ ID NO: 3107 - DNA, 120 bp, synthetic construct
  source 1..120: mol_type = other DNA
acaattatataacccccaatccttccctatcctacacaacataaaaactacatctttatatcaactctctaaattaaataaaaaaaacttctaataaaattaatcaacataaaattttat

SEQ ID NO: 3108 - DNA, 120 bp, synthetic construct
  source 1..120: mol_type = other DNA
ataattgtgtagtttttaatttttttttattttatataatatgaaagttatatttttgtgttagttttttaagttggatggaagaagtttttgataaaattgattagtatggaattttgt

SEQ ID NO: 3109 - DNA, 120 bp, synthetic construct; identical to SEQ ID NO: 3105
  source 1..120: mol_type = other DNA

SEQ ID NO: 3110 - DNA, 120 bp, synthetic construct; identical to SEQ ID NO: 3106
  source 1..120: mol_type = other DNA

SEQ ID NO: 3111 - DNA, 120 bp, synthetic construct; identical to SEQ ID NO: 3107
  source 1..120: mol_type = other DNA

SEQ ID NO: 3112 - DNA, 120 bp, synthetic construct; identical to SEQ ID NO: 3108
  source 1..120: mol_type = other DNA

SEQ ID NO: 3113 - DNA, 120 bp, synthetic construct
  source 1..120: mol_type = other DNA
cacactaccaaaaaataacaactatcaactattattaccctaaaatcacaactactcatattaaaattaaaaaaactataaaaaacaaccatatttaactcctctaataaacaaaaatta

SEQ ID NO: 3114 - DNA, 120 bp, synthetic construct
  source 1..120: mol_type = other DNA
tatattattaagaaatggtgattgttaattattattgttttgggattatagttatttatattagagttaaaaggattgtgagggataattatgtttgatttttttgataaatagaagttg

SEQ ID NO: 3115 - DNA, 120 bp, synthetic construct
  source 1..120: mol_type = other DNA
cacactaccaaaaaataacaactatcaactattattaccctaaaatcacaactactcataaaaaaattaaaaaaactataaaaaacaaccatatttaactcctctaataaacaaaaatta

SEQ ID NO: 3116 - DNA, 120 bp, synthetic construct
  source 1..120: mol_type = other DNA
tatattattaagaaatggtgattgttaattattattgttttgggattatagttatttatagaagagttaaaaggattgtgagggataattatgtttgatttttttgataaatagaagttg

SEQ ID NO: 3117 - DNA, 120 bp, synthetic construct
  source 1..120: mol_type = other DNA
cacactaccaaaaaataacgactatcaactattattaccctaaaatcacaactactcatattaaaattaaaaaaactataaaaaacaaccatatttaactcctctaataaacaaaaatta

SEQ ID NO: 3118 - DNA, 120 bp, synthetic construct
  source 1..120: mol_type = other DNA
tatattattaagaaatggcgattgttaattattattgttttgggattatagttatttatattagagttaaaaggattgtgagggataattatgtttgatttttttgataaatagaagttg

SEQ ID NO: 3119 - DNA, 120 bp, synthetic construct
  source 1..120: mol_type = other DNA
cacactaccaaaaaataacgactatcaactattattaccctaaaatcacaactactcataaaaaaattaaaaaaactataaaaaacaaccatatttaactcctctaataaacaaaaatta

SEQ ID NO: 3120 - DNA, 120 bp, synthetic construct
  source 1..120: mol_type = other DNA
tatattattaagaaatggcgattgttaattattattgttttgggattatagttatttatagaagagttaaaaggattgtgagggataattatgtttgatttttttgataaatagaagttg

SEQ ID NO: 3121 - DNA, 120 bp, synthetic construct
  source 1..120: mol_type = other DNA
aaatactcaaaacctcctccctcaaaccaacacaacatcatccccaaaataaaaataccctctaactacccacatataccaaacctaaaaatttctactatctccatatcaccataaaca

SEQ ID NO: 3122 - DNA, 120 bp, synthetic construct
  source 1..120: mol_type = other DNA
aagtatttagagtttttttttttagattagtatagtattatttttaagatgagaatattttttagttgtttatatgtattaagtttgagggtttttgttgtttttatattattataaata

SEQ ID NO: 3123 - DNA, 120 bp, synthetic construct
  source 1..120: mol_type = other DNA
aaatactcaaaacctcctccctcaaaccaacacaacatcatccccaaaataaaaatacccaataactacccacatataccaaacctaaaaatttctactatctccatatcaccataaaca

SEQ ID NO: 3124 - DNA, 120 bp, synthetic construct
  source 1..120: mol_type = other DNA
aagtatttagagtttttttttttagattagtatagtattatttttaagatgagaatatttagtagttgtttatatgtattaagtttgagggtttttgttgtttttatattattataaata

SEQ ID NO: 3125 - DNA, 120 bp, synthetic construct; identical to SEQ ID NO: 3121
  source 1..120: mol_type = other DNA

SEQ ID NO: 3126 - DNA, 120 bp, synthetic construct; identical to SEQ ID NO: 3122
  source 1..120: mol_type = other DNA

SEQ ID NO: 3127 - DNA, 120 bp, synthetic construct; identical to SEQ ID NO: 3123
  source 1..120: mol_type = other DNA

SEQ ID NO: 3128 - DNA, 120 bp, synthetic construct; identical to SEQ ID NO: 3124
  source 1..120: mol_type = other DNA

SEQ ID NO: 3129 - DNA, 120 bp, synthetic construct
  source 1..120: mol_type = other DNA
aataaaacacttaaaacctttatattattcaaaaaaaaaaaaataacattactcaaacctttacttcattaaatcaaatatacatattaaaaatataaaaaaatatctaaaaattaaaaa

SEQ ID NO: 3130 - DNA, 120 bp, synthetic construct
  source 1..120: mol_type = other DNA
aatagggtatttagggtttttgtgttatttaggagaagagaaatagtattgtttaaatttttgttttgttgagttaagtgtgtatgttaaaaatatagggaaatgtttaaaaattaaaaa

SEQ ID NO: 3131 - DNA, 120 bp, synthetic construct
  source 1..120: mol_type = other DNA
aataaaacacttaaaacctttatattattcaaaaaaaaaaaaataacattactcaaacctaaacttcattaaatcaaatatacatattaaaaatataaaaaaatatctaaaaattaaaaa

SEQ ID NO: 3132 - DNA, 120 bp, synthetic construct
  source 1..120: mol_type = other DNA
aatagggtatttagggtttttgtgttatttaggagaagagaaatagtattgtttaaatttgggttttgttgagttaagtgtgtatgttaaaaatatagggaaatgtttaaaaattaaaaa

SEQ ID NO: 3133 - DNA, 120 bp, synthetic construct
  source 1..120: mol_type = other DNA
aataaaacacttaaaacctttatattattcaaaaaaaaaaaaataacattactcaaacctttacttcgttaaatcaaatatacatattaaaaatataaaaaaatatctaaaaattaaaaa

SEQ ID NO: 3134 - DNA, 120 bp, synthetic construct
  source 1..120: mol_type = other DNA
aatagggtatttagggtttttgtgttatttaggagaagagaaatagtattgtttaaatttttgtttcgttgagttaagtgtgtatgttaaaaatatagggaaatgtttaaaaattaaaaa

SEQ ID NO: 3135 - DNA, 120 bp, synthetic construct
  source 1..120: mol_type = other DNA
aataaaacacttaaaacctttatattattcaaaaaaaaaaaaataacattactcaaacctaaacttcgttaaatcaaatatacatattaaaaatataaaaaaatatctaaaaattaaaaa

SEQ ID NO: 3136 - DNA, 120 bp, synthetic construct
  source 1..120: mol_type = other DNA
aatagggtatttagggtttttgtgttatttaggagaagagaaatagtattgtttaaatttgggtttcgttgagttaagtgtgtatgttaaaaatatagggaaatgtttaaaaattaaaaa

SEQ ID NO: 3137 - DNA, 120 bp, synthetic construct
  source 1..120: mol_type = other DNA
ctaaccaaaattaccactccattctaaccccaaaccaccctaaaaaaaaatttctaaaaataccaataactcactctatccttaaataacttaatttttattaaaataaaaataaaaatt

SEQ ID NO: 3138 - DNA, 120 bp, synthetic construct
  source 1..120: mol_type = other DNA
ttggttggggttgttgttttgttttgattttaggttattttggaggagggtttttgagagtgttggtggtttattttgtttttggatgatttgatttttgttaaaatggaaatggaaatt

SEQ ID NO: 3139 - DNA, 120 bp, synthetic construct
  source 1..120: mol_type = other DNA
ctaaccaaaattaccactccattctaaccccaaaccaccctaaaaaaaaatttctaaaaaatccaataactcactctatccttaaataacttaatttttattaaaataaaaataaaaatt

SEQ ID NO: 3140 - DNA, 120 bp, synthetic construct
  source 1..120: mol_type = other DNA
ttggttggggttgttgttttgttttgattttaggttattttggaggagggtttttgagaggtttggtggtttattttgtttttggatgatttgatttttgttaaaatggaaatggaaatt

SEQ ID NO: 3141 - DNA, 120 bp, synthetic construct
  source 1..120: mol_type = other DNA
ctaaccgaaattaccgctccgttctaaccccaaaccaccctaaaaaaaaatttctaaaaataccgataactcactctatccttaaataacttaatttttattaaaataaaaataaaaatt

SEQ ID NO: 3142 - DNA, 120 bp, synthetic construct
  source 1..120: mol_type = other DNA
ttggtcggggttgtcgtttcgttttgattttaggttattttggaggagggtttttgagagtgtcggtggtttattttgtttttggatgatttgatttttgttaaaatggaaatggaaatt

SEQ ID NO: 3143 - DNA, 120 bp, synthetic construct
  source 1..120: mol_type = other DNA
ctaaccgaaattaccgctccgttctaaccccaaaccaccctaaaaaaaaatttctaaaaaatccgataactcactctatccttaaataacttaatttttattaaaataaaaataaaaatt

SEQ ID NO: 3144 - DNA, 120 bp, synthetic construct
  source 1..120: mol_type = other DNA
ttggtcggggttgtcgtttcgttttgattttaggttattttggaggagggtttttgagaggttcggtggtttattttgtttttggatgatttgatttttgttaaaatggaaatggaaatt

SEQ ID NO: 3145 - DNA, 120 bp, synthetic construct
  source 1..120: mol_type = other DNA
aaaaaaaaaactcaaacactaataaatattaacttacttaacttcactctctaaaccccatattcttttaaaaataaaattaataattactatttaccaacactttataaaaattaaata

SEQ ID NO: 3146 - DNA, 120 bp, synthetic construct
  source 1..120: mol_type = other DNA
agaagagaaatttaaatattggtgaatgttagtttgtttggttttattttttgagttttatatttttttgaaagtggaattaataattgttatttgttagtattttatgaagattaaatg

SEQ ID NO: 3147 - DNA, 120 bp, synthetic construct
  source 1..120: mol_type = other DNA
aaaaaaaaaactcaaacactaataaatattaacttacttaacttcactctctaaaccccaacttcttttaaaaataaaattaataattactatttaccaacactttataaaaattaaata

SEQ ID NO: 3148 - DNA, 120 bp, synthetic construct
  source 1..120: mol_type = other DNA
agaagagaaatttaaatattggtgaatgttagtttgtttggttttattttttgagttttaattttttttgaaagtggaattaataattgttatttgttagtattttatgaagattaaatg

SEQ ID NO: 3149 - DNA, 120 bp, synthetic construct; identical to SEQ ID NO: 3145
  source 1..120: mol_type = other DNA

SEQ ID NO: 3150 - DNA, 120 bp, synthetic construct; identical to SEQ ID NO: 3146
  source 1..120: mol_type = other DNA

SEQ ID NO: 3151 - DNA, 120 bp, synthetic construct; identical to SEQ ID NO: 3147
  source 1..120: mol_type = other DNA

SEQ ID NO: 3152 - DNA, 120 bp, synthetic construct; identical to SEQ ID NO: 3148
  source 1..120: mol_type = other DNA

SEQ ID NO: 3153 - DNA, 120 bp, synthetic construct
  source 1..120: mol_type = other DNA
ttaaattttttctaacactttatattatccttatacaaatcataactaaatacttaaaaatcaataaatatttaaaaataaaaataatataaaaataaatcctaatatcatttaactata

SEQ ID NO: 3154 - DNA, 120 bp, synthetic construct
  source 1..120: mol_type = other DNA
ttagattttttttgatattttatgttgtttttgtataagttataattaaatgtttaagagttagtgagtatttaaagataagagtaatgtgaaaataagttttgatattatttggttgtg

SEQ ID NO: 3155 - DNA, 120 bp, synthetic construct
  source 1..120: mol_type = other DNA
ttaaattttttctaacactttatattatccttatacaaatcataactaaatacttaaaaaaaaataaatatttaaaaataaaaataatataaaaataaatcctaatatcatttaactata

SEQ ID NO: 3156 - DNA, 120 bp, synthetic construct
  source 1..120: mol_type = other DNA
ttagattttttttgatattttatgttgtttttgtataagttataattaaatgtttaagagaaagtgagtatttaaagataagagtaatgtgaaaataagttttgatattatttggttgtg

SEQ ID NO: 3157 - DNA, 120 bp, synthetic construct; identical to SEQ ID NO: 3153
  source 1..120: mol_type = other DNA

SEQ ID NO: 3158 - DNA, 120 bp, synthetic construct; identical to SEQ ID NO: 3154
  source 1..120: mol_type = other DNA

SEQ ID NO: 3159 - DNA, 120 bp, synthetic construct; identical to SEQ ID NO: 3155
  source 1..120: mol_type = other DNA

SEQ ID NO: 3160 - DNA, 120 bp, synthetic construct; identical to SEQ ID NO: 3156
  source 1..120: mol_type = other DNA

SEQ ID NO: 3161 - DNA, 120 bp, synthetic construct
  source 1..120: mol_type = other DNA
atctaaaaaacaaccaatcctttcaaaaatatacctctatcaaaaaaactaaaatctacacattctcttcttaactaataaaaaataatctatttatttcctataaaactatataatttt

SEQ ID NO: 3162 - DNA, 120 bp, synthetic construct
  source 1..120: mol_type = other DNA
gtttgaagagtagttagtttttttagaaatgtatttttgttaaagaaattggaatttgtatgttttttttttgattagtgaaaagtaatttgtttattttttatggggttatataatttt

SEQ ID NO: 3163 - DNA, 120 bp, synthetic construct
  source 1..120: mol_type = other DNA
atctaaaaaacaaccaatcctttcaaaaatatacctctatcaaaaaaactaaaatctacaacttctcttcttaactaataaaaaataatctatttatttcctataaaactatataatttt

SEQ ID NO: 3164 - DNA, 120 bp, synthetic construct
  source 1..120: mol_type = other DNA
gtttgaagagtagttagtttttttagaaatgtatttttgttaaagaaattggaatttgtagtttttttttttgattagtgaaaagtaatttgtttattttttatggggttatataatttt

SEQ ID NO: 3165 - DNA, 120 bp, synthetic construct
  source 1..120: mol_type = other DNA
atctaaaaaacaaccaatcctttcaaaaatatacctctatcaaaaaaactaaaatctacacgttctcttcttaactaataaaaaataatctatttatttcctataaaactatataatttt

SEQ ID NO: 3166 - DNA, 120 bp, synthetic construct
  source 1..120: mol_type = other DNA
gtttgaagagtagttagtttttttagaaatgtatttttgttaaagaaattggaatttgtacgttttttttttgattagtgaaaagtaatttgtttattttttatggggttatataatttt

SEQ ID NO: 3167 - DNA, 120 bp, synthetic construct; identical to SEQ ID NO: 3163
  source 1..120: mol_type = other DNA

SEQ ID NO: 3168 - DNA, 120 bp, synthetic construct; identical to SEQ ID NO: 3164
  source 1..120: mol_type = other DNA

SEQ ID NO: 3169 - DNA, 120 bp, synthetic construct
  source 1..120: mol_type = other DNA
acttctacaccttcctacaccaaaccaaacttaaccctaaaacacaacaatctaacctaactacatatttcatatataataaattaataacccatctctcatcctaatcactatcacctc

SEQ ID NO: 3170 - DNA, 120 bp, synthetic construct
  source 1..120: mol_type = other DNA
atttttgtatttttttgtattaaattagatttgattttggaatatagtaatttgatttggttgtgtgttttatgtgtggtgggttgatggtttattttttattttggttattgttatttt

SEQ ID NO: 3171 - DNA, 120 bp, synthetic construct
  source 1..120: mol_type = other DNA
acttctacaccttcctacaccaaaccaaacttaaccctaaaacacaacaatctaacctaaaaacatatttcatatataataaattaataacccatctctcatcctaatcactatcacctc

SEQ ID NO: 3172 - DNA, 120 bp, synthetic construct
  source 1..120: mol_type = other DNA
atttttgtatttttttgtattaaattagatttgattttggaatatagtaatttgatttgggggtgtgttttatgtgtggtgggttgatggtttattttttattttggttattgttatttt

SEQ ID NO: 3173 - DNA, 120 bp, synthetic construct
  source 1..120: mol_type = other DNA
acttctacaccttcctacaccaaaccaaacttaaccctaaaacacaacaatctaacctaactacgtatttcatatataataaattaataacccatctctcatcctaatcactatcacctc

SEQ ID NO: 3174 - DNA, 120 bp, synthetic construct
  source 1..120: mol_type = other DNA
atttttgtatttttttgtattaaattagatttgattttggaatatagtaatttgatttggttgcgtgttttatgtgtggtgggttgatggtttattttttattttggttattgttatttt

SEQ ID NO: 3175 - DNA, 120 bp, synthetic construct
  source 1..120: mol_type = other DNA
acttctacaccttcctacaccaaaccaaacttaaccctaaaacacaacaatctaacctaaaaacgtatttcatatataataaattaataacccatctctcatcctaatcactatcacctc

SEQ ID NO: 3176 - DNA, 120 bp, synthetic construct
  source 1..120: mol_type = other DNA
atttttgtatttttttgtattaaattagatttgattttggaatatagtaatttgatttgggggcgtgttttatgtgtggtgggttgatggtttattttttattttggttattgttatttt

SEQ ID NO: 3177 - DNA, 120 bp, synthetic construct
  source 1..120: mol_type = other DNA
atactacaaaaataaaaatcactttattttaaattaaaataaaaaaaaacaatcaatcccccaaaacaatttaacatcctctaatatcacaaaaacaaaaaaacaaaactcaaaaaaaaa

SEQ ID NO: 3178 - DNA, 120 bp, synthetic construct
  source 1..120: mol_type = other DNA
gtattgtaaaaatgaaaattgttttattttgaattaaggtgaggaggaataattagttttttggaataatttaatgttttttgatgttataggaatagaaaaatagagtttagagagaag

SEQ ID NO: 3179 - DNA, 120 bp, synthetic construct
  source 1..120: mol_type = other DNA
atactacaaaaataaaaatcactttattttaaattaaaataaaaaaaaacaatcaatcccaaaaaacaatttaacatcctctaatatcacaaaaacaaaaaaacaaaactcaaaaaaaaa

SEQ ID NO: 3180 - DNA, 120 bp, synthetic construct
  source 1..120: mol_type = other DNA
gtattgtaaaaatgaaaattgttttattttgaattaaggtgaggaggaataattagttttggggaataatttaatgttttttgatgttataggaatagaaaaatagagtttagagagaag

SEQ ID NO: 3181 - DNA, 120 bp, synthetic construct
  source 1..120: mol_type = other DNA
atactacaaaaataaaaatcgctttattttaaattaaaataaaaaaaaacaatcaatcccccgaaacaatttaacgtcctctaatatcacaaaaacaaaaaaacaaaactcaaaaaaaaa

SEQ ID NO: 3182 - DNA, 120 bp, synthetic construct
  source 1..120: mol_type = other DNA
gtattgtaaaaatgaaaatcgttttattttgaattaaggtgaggaggaataattagtttttcggaataatttaacgttttttgatgttataggaatagaaaaatagagtttagagagaag

SEQ ID NO: 3183 - DNA, 120 bp, synthetic construct
  source 1..120: mol_type = other DNA
atactacaaaaataaaaatcgctttattttaaattaaaataaaaaaaaacaatcaatcccgaaaaacaatttaacgtcctctaatatcacaaaaacaaaaaaacaaaactcaaaaaaaaa

SEQ ID NO: 3184 - DNA, 120 bp, synthetic construct
  source 1..120: mol_type = other DNA
gtattgtaaaaatgaaaatcgttttattttgaattaaggtgaggaggaataattagtttcggggaataatttaacgttttttgatgttataggaatagaaaaatagagtttagagagaag

SEQ ID NO: 3185 - DNA, 120 bp, synthetic construct
  source 1..120: mol_type = other DNA
ttccaaaaaacaccaaaaaacacaaaactaaaaatcaaacaactaaatcctaactaaaaaacaataaaacataacacctaccaaatctaaaaaaaaaaaaaaaaaaccacaaaacaaaac

SEQ ID NO: 3186 - DNA, 120 bp, synthetic construct
  source 1..120: mol_type = other DNA
ttttaagggatattagggggtatagaattggaagttaggtagttgagttttggttaggaagtagtgggatgtgatatttgttaagtttgaagggagagaaaggaggttatagggtagggt

SEQ ID NO: 3187 - DNA, 120 bp, synthetic construct
  source 1..120: mol_type = other DNA
ttccaaaaaacaccaaaaaacacaaaactaaaaatcaaacaactaaatcctaactaaaaataaataaaacataacacctaccaaatctaaaaaaaaaaaaaaaaaaccacaaaacaaaac

SEQ ID NO: 3188 - DNA, 120 bp, synthetic construct
  source 1..120: mol_type = other DNA
ttttaagggatattagggggtatagaattggaagttaggtagttgagttttggttaggaatgagtgggatgtgatatttgttaagtttgaagggagagaaaggaggttatagggtagggt

SEQ ID NO: 3189 - DNA, 120 bp, synthetic construct
  source 1..120: mol_type = other DNA
ttccaaaaaacaccaaaaaacacaaaactaaaaatcaaacaactaaatcctaactaaaaaacaataaaacgtaacacctaccaaatctaaaaaaaaaaaaaaaaaaccacaaaacaaaac

SEQ ID NO: 3190 - DNA, 120 bp, synthetic construct
  source 1..120: mol_type = other DNA
ttttaagggatattagggggtatagaattggaagttaggtagttgagttttggttaggaagtagtgggacgtgatatttgttaagtttgaagggagagaaaggaggttatagggtagggt

SEQ ID NO: 3191 - DNA, 120 bp, synthetic construct
  source 1..120: mol_type = other DNA
ttccaaaaaacaccaaaaaacacaaaactaaaaatcaaacaactaaatcctaactaaaaataaataaaacgtaacacctaccaaatctaaaaaaaaaaaaaaaaaaccacaaaacaaaac

SEQ ID NO: 3192 - DNA, 120 bp, synthetic construct
  source 1..120: mol_type = other DNA
ttttaagggatattagggggtatagaattggaagttaggtagttgagttttggttaggaatgagtgggacgtgatatttgttaagtttgaagggagagaaaggaggttatagggtagggt

SEQ ID NO: 3193 - DNA, 120 bp, synthetic construct
  source 1..120: mol_type = other DNA
aaattattattaaaacaattttaaaattcttaatcccaataaattaataactaaaactctattcattttaataaaaaacatataatcatctatacacaaaactaaatatttttattctat

SEQ ID NO: 3194 - DNA, 120 bp, synthetic construct
  source 1..120: mol_type = other DNA
ggattattattgaaataattttgaggtttttagttttaataaattagtggttaaggttttatttattttggtaaggagtatatggttatttgtgtataagattgaatgtttttgttttgt

SEQ ID NO: 3195 - DNA, 120 bp, synthetic construct
  source 1..120: mol_type = other DNA
aaattattattaaaacaattttaaaattcttaatcccaataaattaataactaaaactcttatcattttaataaaaaacatataatcatctatacacaaaactaaatatttttattctat

SEQ ID NO: 3196 - DNA, 120 bp, synthetic construct
  source 1..120: mol_type = other DNA
ggattattattgaaataattttgaggtttttagttttaataaattagtggttaaggtttttattattttggtaaggagtatatggttatttgtgtataagattgaatgtttttgttttgt

SEQ ID NO: 3197 - DNA, 120 bp, synthetic construct; identical to SEQ ID NO: 3193
  source 1..120: mol_type = other DNA

SEQ ID NO: 3198 - DNA, 120 bp, synthetic construct; identical to SEQ ID NO: 3194
  source 1..120: mol_type = other DNA

SEQ ID NO: 3199 - DNA, 120 bp, synthetic construct; identical to SEQ ID NO: 3195
  source 1..120: mol_type = other DNA

SEQ ID NO: 3200 - DNA, 120 bp, synthetic construct; identical to SEQ ID NO: 3196
  source 1..120: mol_type = other DNA

SEQ ID NO: 3201 - DNA, 120 bp, synthetic construct
  source 1..120: mol_type = other DNA
tatataaaaattaacttcaaaatctataaaattacactcaaattatcatcaataattcctaataatactttttaaaaaaaaattcattcattccctccttcaaatatacaatataaattc

SEQ ID NO: 3202 - DNA, 120 bp, synthetic construct
  source 1..120: mol_type = other DNA
tgtgtaaaaattaattttagaatttatgaaattatatttgagttgttattagtaatttttaatggtattttttagaaaaaaatttatttatttttttttttaaatatgtaatataaattt

SEQ ID NO: 3203 - DNA, 120 bp, synthetic construct
  source 1..120: mol_type = other DNA
tatataaaaattaacttcaaaatctataaaattacactcaaattatcatcaataattcctcctaatactttttaaaaaaaaattcattcattccctccttcaaatatacaatataaattc

SEQ ID NO: 3204 - DNA, 120 bp, synthetic construct
  source 1..120: mol_type = other DNA
tgtgtaaaaattaattttagaatttatgaaattatatttgagttgttattagtaattttttttggtattttttagaaaaaaatttatttatttttttttttaaatatgtaatataaattt

SEQ ID NO: 3205 - DNA, 120 bp, synthetic construct
  source 1..120: mol_type = other DNA
tatataaaaattaacttcaaaatctataaaattacactcgaattatcatcaataattcctaataatactttttaaaaaaaaattcattcattccctccttcaaatatacaatataaattc

SEQ ID NO: 3206 - DNA, 120 bp, synthetic construct
  source 1..120: mol_type = other DNA
tgtgtaaaaattaattttagaatttatgaaattatattcgagttgttattagtaatttttaatggtattttttagaaaaaaatttatttatttttttttttaaatatgtaatataaattt

SEQ ID NO: 3207 - DNA, 120 bp, synthetic construct
  source 1..120: mol_type = other DNA
tatataaaaattaacttcaaaatctataaaattacactcgaattatcatcaataattcctcctaatactttttaaaaaaaaattcattcattccctccttcaaatatacaatataaattc

SEQ ID NO: 3208 - DNA, 120 bp, synthetic construct
  source 1..120: mol_type = other DNA
tgtgtaaaaattaattttagaatttatgaaattatattcgagttgttattagtaattttttttggtattttttagaaaaaaatttatttatttttttttttaaatatgtaatataaattt

SEQ ID NO: 3209 - DNA, 120 bp, synthetic construct
  source 1..120: mol_type = other DNA
taataaaaataccatataaactaaccattaaaaattaaatctaaaaaaaaaaaaactattccactctccttaattactaataaatatctaaataaaaaccaaaaccacaaacatacaatt

SEQ ID NO: 3210 - DNA, 120 bp, synthetic construct
  source 1..120: mol_type = other DNA
tagtggaaatgttatgtgaattggttattgaagattaagtttgagaaagggaaagttattttattttttttagttattggtagatatttaagtagaagttagggttataaatatgtagtt

SEQ ID NO: 3211 - DNA, 120 bp, synthetic construct
  source 1..120: mol_type = other DNA
taataaaaataccatataaactaaccattaaaaattaaatctaaaaaaaaaaaaactattaaactctccttaattactaataaatatctaaataaaaaccaaaaccacaaacatacaatt

SEQ ID NO: 3212 - DNA, 120 bp, synthetic construct
  source 1..120: mol_type = other DNA
tagtggaaatgttatgtgaattggttattgaagattaagtttgagaaagggaaagttattaaattttttttagttattggtagatatttaagtagaagttagggttataaatatgtagtt

SEQ ID NO: 3213 - DNA, 120 bp, synthetic construct; identical to SEQ ID NO: 3209
  source 1..120: mol_type = other DNA

SEQ ID NO: 3214 - DNA, 120 bp, synthetic construct; identical to SEQ ID NO: 3210
  source 1..120: mol_type = other DNA

SEQ ID NO: 3215 - DNA, 120 bp, synthetic construct; identical to SEQ ID NO: 3211
  source 1..120: mol_type = other DNA

SEQ ID NO: 3216 - DNA, 120 bp, synthetic construct; identical to SEQ ID NO: 3212
  source 1..120: mol_type = other DNA

SEQ ID NO: 3217 - DNA, 120 bp, synthetic construct
  source 1..120: mol_type = other DNA
ttttaaacttcttttcattaatataactataattttttcaattttattaaactttccataaataacaaacccttcattttattaaaattttcatttactctactccttattattttattc

SEQ ID NO: 3218 - DNA, 120 bp, synthetic construct
  source 1..120: mol_type = other DNA
ttttaaatttttttttattaatgtagttatagtttttttagttttgttgagttttttataaataataaattttttattttgttgaaatttttgtttgttttattttttattattttattt

SEQ ID NO: 3219 - DNA, 120 bp, synthetic construct
  source 1..120: mol_type = other DNA
ttttaaacttcttttcattaatataactataattttttcaattttattaaactttccaaaaaaaacaaacccttcattttattaaaattttcatttactctactccttattattttattc

SEQ ID NO: 3220 - DNA, 120 bp, synthetic construct
  source 1..120: mol_type = other DNA
ttttaaatttttttttattaatgtagttatagtttttttagttttgttgagttttttaaaaagaataaattttttattttgttgaaatttttgtttgttttattttttattattttattt

SEQ ID NO: 3221 - DNA, 120 bp, synthetic construct
  source 1..120: mol_type = other DNA
ttttaaacttcttttcattaatataactataattttttcaattttattaaactttccataaataacaaacccttcattttattaaaattttcgtttactctactccttattattttattc

SEQ ID NO: 3222 - DNA, 120 bp, synthetic construct
  source 1..120: mol_type = other DNA
ttttaaatttttttttattaatgtagttatagtttttttagttttgttgagttttttataaataataaattttttattttgttgaaattttcgtttgttttattttttattattttattt

SEQ ID NO: 3223 - DNA, 120 bp, synthetic construct
  source 1..120: mol_type = other DNA
ttttaaacttcttttcattaatataactataattttttcaattttattaaactttccaaaaaaaacaaacccttcattttattaaaattttcgtttactctactccttattattttattc

SEQ ID NO: 3224 - DNA, 120 bp, synthetic construct
  source 1..120: mol_type = other DNA
ttttaaatttttttttattaatgtagttatagtttttttagttttgttgagttttttaaaaagaataaattttttattttgttgaaattttcgtttgttttattttttattattttattt

SEQ ID NO: 3225 - DNA, 120 bp, synthetic construct
  source 1..120: mol_type = other DNA
taataataatacttatccactatattacaattaattcctaataattctaaacatataatattttaaactaataaaaaaaacaaccctttttactctaactaaaatactttaccacattct

SEQ ID NO: 3226 - DNA, 120 bp, synthetic construct
  source 1..120: mol_type = other DNA
tagtaataatgtttgtttattatgttatagttaatttttaatgattttagatatatggtattttgggttgatagggaaaataattttttttgttttaattaaagtgttttattatatttt

SEQ ID NO: 3227 - DNA, 120 bp, synthetic construct
  source 1..120: mol_type = other DNA
taataataatacttatccactatattacaattaattcctaataattctaaacatataaaatttaaaactaataaaaaaaacaaccctttttactctaactaaaatactttaccacattct

SEQ ID NO: 3228 - DNA, 120 bp, synthetic construct
  source 1..120: mol_type = other DNA
tagtaataatgtttgtttattatgttatagttaatttttaatgattttagatatatggaatttggggttgatagggaaaataattttttttgttttaattaaagtgttttattatatttt

SEQ ID NO: 3229 - DNA, 120 bp, synthetic construct; identical to SEQ ID NO: 3225
  source 1..120: mol_type = other DNA

SEQ ID NO: 3230 - DNA, 120 bp, synthetic construct; identical to SEQ ID NO: 3226
  source 1..120: mol_type = other DNA

SEQ ID NO: 3231 - DNA, 120 bp, synthetic construct; identical to SEQ ID NO: 3227
  source 1..120: mol_type = other DNA

SEQ ID NO: 3232 - DNA, 120 bp, synthetic construct; identical to SEQ ID NO: 3228
  source 1..120: mol_type = other DNA

SEQ ID NO: 3233 - DNA, 120 bp, synthetic construct
  source 1..120: mol_type = other DNA
ttttcctcatcaaaatttataaaaactccataccttcaattaccaaaaaccaaaataattaattttatctttaatttttctatctttttcaccccacattcaaaacaaattctattaatt

SEQ ID NO: 3234 - DNA, 120 bp, synthetic construct
  source 1..120: mol_type = other DNA
ttttttttattaaaatttatggaaattttatatttttagttgttaaggattaaaatggttggttttatttttgatttttttgttttttttattttatatttgaggtaaattttattgatt

SEQ ID NO: 3235 - DNA, 120 bp, synthetic construct
  source 1..120: mol_type = other DNA
ttttcctcatcaaaatttataaaaactccataccttcaattaccaaaaaccaaaataaataatattatctttaatttttctatctttttcaccccacattcaaaacaaattctattaatt

SEQ ID NO: 3236 - DNA, 120 bp, synthetic construct
  source 1..120: mol_type = other DNA
ttttttttattaaaatttatggaaattttatatttttagttgttaaggattaaaatgggtggtattatttttgatttttttgttttttttattttatatttgaggtaaattttattgatt

SEQ ID NO: 3237 - DNA, 120 bp, synthetic construct
  source 1..120: mol_type = other DNA
ttttcctcatcaaaatttataaaaactccataccttcaattaccaaaaaccaaaataattaattttatctttaatttttctatctttttcaccccacattcgaaacaaattctattaatt

SEQ ID NO: 3238 - DNA, 120 bp, synthetic construct
  source 1..120: mol_type = other DNA
ttttttttattaaaatttatggaaattttatatttttagttgttaaggattaaaatggttggttttatttttgatttttttgttttttttattttatattcgaggtaaattttattgatt

SEQ ID NO: 3239 - DNA, 120 bp, synthetic construct
  source 1..120: mol_type = other DNA
ttttcctcatcaaaatttataaaaactccataccttcaattaccaaaaaccaaaataaataatattatctttaatttttctatctttttcaccccacattcgaaacaaattctattaatt

SEQ ID NO: 3240 - DNA, 120 bp, synthetic construct
  source 1..120: mol_type = other DNA
ttttttttattaaaatttatggaaattttatatttttagttgttaaggattaaaatgggtggtattatttttgatttttttgttttttttattttatattcgaggtaaattttattgatt

SEQ ID NO: 3241 - DNA, 120 bp, synthetic construct
  source 1..120: mol_type = other DNA
aataaaaaaaactcactaaaaaaatataactactatacatttaaacatataacctcaaatatataaaaaaattaacaaaataaaaaaaaaaataacttaacatataatcataaaaatata

SEQ ID NO: 3242 - DNA, 120 bp, synthetic construct
  source 1..120: mol_type = other DNA
gataaaaggaatttattaagaaaatgtaattattgtatatttaaatatgtagttttaaatatatgaaaaagttgatagaataaaaggaaaaatagtttaatatataattatagagatgta

SEQ ID NO: 3243 - DNA, 120 bp, synthetic construct
  source 1..120: mol_type = other DNA
aataaaaaaaactcactaaaaaaatataactactatacatttaaacatataacctcacatataaaaaaaaattaacaaaataaaaaaaaaaataacttaacatataatcataaaaatata

SEQ ID NO: 3244 - DNA, 120 bp, synthetic construct
  source 1..120: mol_type = other DNA
gataaaaggaatttattaagaaaatgtaattattgtatatttaaatatgtagttttatatataagaaaaagttgatagaataaaaggaaaaatagtttaatatataattatagagatgta

SEQ ID NO: 3245 - DNA, 120 bp, synthetic construct; identical to SEQ ID NO: 3241
  source 1..120: mol_type = other DNA

SEQ ID NO: 3246 - DNA, 120 bp, synthetic construct; identical to SEQ ID NO: 3242
  source 1..120: mol_type = other DNA

SEQ ID NO: 3247 - DNA, 120 bp, synthetic construct; identical to SEQ ID NO: 3243
  source 1..120: mol_type = other DNA

SEQ ID NO: 3248 - DNA, 120 bp, synthetic construct; identical to SEQ ID NO: 3244
  source 1..120: mol_type = other DNA

SEQ ID NO: 3249 - DNA, 120 bp, synthetic construct
  source 1..120: mol_type = other DNA
aattaaattaaaacattattttcttctcaaattccattttaaattaaacctcataaaaaaatacatccattcatttaataatactctaatacctactcaacaacaaaacatacaaaaaaa

SEQ ID NO: 3250 - DNA, 120 bp, synthetic construct
  source 1..120: mol_type = other DNA
aattaaattaagatattattttttttttaaattttattttggattgagttttatgggggggtatgtttatttatttaataatgttttgatgtttatttagtagtaaaatatataaaggaa

SEQ ID NO: 3251 - DNA, 120 bp, synthetic construct
  source 1..120: mol_type = other DNA
aattaaattaaaacattattttcttctcaaattccattttaaattaaacctcataaataaataaatccattcatttaataatactctaatacctactcaacaacaaaacatacaaaaaaa

SEQ ID NO: 3252 - DNA, 120 bp, synthetic construct
  source 1..120: mol_type = other DNA
aattaaattaagatattattttttttttaaattttattttggattgagttttatgggtgggtaagtttatttatttaataatgttttgatgtttatttagtagtaaaatatataaaggaa

SEQ ID NO: 3253 - DNA, 120 bp, synthetic construct
  source 1..120: mol_type = other DNA
aattaaattaaaacattattttcttctcaaattccattttaaattaaacctcataaaaaaatacgtccattcatttaataatactctaatacctactcaacaacaaaacatacaaaaaaa

SEQ ID NO: 3254 - DNA, 120 bp, synthetic construct
  source 1..120: mol_type = other DNA
aattaaattaagatattattttttttttaaattttattttggattgagttttatgggggggtacgtttatttatttaataatgttttgatgtttatttagtagtaaaatatataaaggaa

SEQ ID NO: 3255 - DNA, 120 bp, synthetic construct; identical to SEQ ID NO: 3251
  source 1..120: mol_type = other DNA

SEQ ID NO: 3256 - DNA, 120 bp, synthetic construct; identical to SEQ ID NO: 3252
  source 1..120: mol_type = other DNA

SEQ ID NO: 3257 - DNA, 120 bp, synthetic construct
  source 1..120: mol_type = other DNA
taacaaacaataaaacatatctcaaaaaaaaaaaacttacaaaaataaaacaacaaaacattatttactttaaaaatacttactttattataaatttttctatttaattccaattttaat

SEQ ID NO: 3258 - DNA, 120 bp, synthetic construct
  source 1..120: mol_type = other DNA
tgataaatagtagagtatattttagggaggaaagatttataaagataaaatagtaaggtattatttgttttggaaatgtttgttttattgtgggtttttttatttgattttgattttggt

SEQ ID NO: 3259 - DNA, 120 bp, synthetic construct
  source 1..120: mol_type = other DNA
taacaaacaataaaacatatctcaaaaaaaaaaaacttacaaaaataaaacaacaaaaaattaattactttaaaaatacttactttattataaatttttctatttaattccaattttaat

SEQ ID NO: 3260 - DNA, 120 bp, synthetic construct
  source 1..120: mol_type = other DNA
tgataaatagtagagtatattttagggaggaaagatttataaagataaaatagtaagggattagttgttttggaaatgtttgttttattgtgggtttttttatttgattttgattttggt

SEQ ID NO: 3261 - DNA, 120 bp, synthetic construct
  source 1..120: mol_type = other DNA
taacaaacaataaaacatatctcaaaaaaaaaaaacttacaaaaataaaacaacaaaacattatttactttaaaaatacttactttattataaatttttctatttaattccgattttaat

SEQ ID NO: 3262 - DNA, 120 bp, synthetic construct
  source 1..120: mol_type = other DNA
tgataaatagtagagtatattttagggaggaaagatttataaagataaaatagtaaggtattatttgttttggaaatgtttgttttattgtgggtttttttatttgatttcgattttggt

SEQ ID NO: 3263 - DNA, 120 bp, synthetic construct
  source 1..120: mol_type = other DNA
taacaaacaataaaacatatctcaaaaaaaaaaaacttacaaaaataaaacaacaaaaaattaattactttaaaaatacttactttattataaatttttctatttaattccgattttaat

SEQ ID NO: 3264 - DNA, 120 bp, synthetic construct
  source 1..120: mol_type = other DNA
tgataaatagtagagtatattttagggaggaaagatttataaagataaaatagtaagggattagttgttttggaaatgtttgttttattgtgggtttttttatttgatttcgattttggt

SEQ ID NO: 3265 - DNA, 120 bp, synthetic construct
  source 1..120: mol_type = other DNA
taactatataatcaatactccataaacatttattaaacacctactatatactaaaactaaaaaacttatataaatttattccaatataatacaataactatatcaacaaaaaaacataca

SEQ ID NO: 3266 - DNA, 120 bp, synthetic construct
  source 1..120: mol_type = other DNA
tgattgtataattaatattttataaatatttgttgaatatttgttatgtgttaggattaaaagatttgtgtaaatttattttggtataatataataattatattaataggaagatatata

SEQ ID NO: 3267 - DNA, 120 bp, synthetic construct
  source 1..120: mol_type = other DNA
taactatataatcaatactccataaacatttattaaacacctactatatactaaaacaaaaaaaattatataaatttattccaatataatacaataactatatcaacaaaaaaacataca

SEQ ID NO: 3268 - DNA, 120 bp, synthetic construct
  source 1..120: mol_type = other DNA
tgattgtataattaatattttataaatatttgttgaatatttgttatgtgttaggataaaaagaattgtgtaaatttattttggtataatataataattatattaataggaagatatata

SEQ ID NO: 3269 - DNA, 120 bp, synthetic construct
  source 1..120: mol_type = other DNA
taactatataatcaatactccataaacatttattaaacacctactatatactaaaactaaaaaacttatataaatttattccgatataatacaataactatatcaacaaaaaaacataca

SEQ ID NO: 3270 - DNA, 120 bp, synthetic construct
  source 1..120: mol_type = other DNA
tgattgtataattaatattttataaatatttgttgaatatttgttatgtgttaggattaaaagatttgtgtaaatttatttcggtataatataataattatattaataggaagatatata

SEQ ID NO: 3271 - DNA, 120 bp, synthetic construct
  source 1..120: mol_type = other DNA
taactatataatcaatactccataaacatttattaaacacctactatatactaaaacaaaaaaaattatataaatttattccgatataatacaataactatatcaacaaaaaaacataca

SEQ ID NO: 3272 - DNA, 120 bp, synthetic construct
  source 1..120: mol_type = other DNA
tgattgtataattaatattttataaatatttgttgaatatttgttatgtgttaggataaaaagaattgtgtaaatttatttcggtataatataataattatattaataggaagatatata

SEQ ID NO: 3273 - DNA, 120 bp, synthetic construct
  source 1..120: mol_type = other DNA
caaattcttctttaattccctaaaaaatatataatctttttctaactccatcttcctactataactaactcaaataaaaaccccctacttaataactaaaaaactcaaaaactcccaaac

SEQ ID NO: 3274 - DNA, 120 bp, synthetic construct
  source 1..120: mol_type = other DNA
taggtttttttttaattttttaaaaagtatgtagtttttttttagttttatttttttgttatggttggtttaagtaaaaattttttgtttggtgattagagaatttagaagtttttaggt

SEQ ID NO: 3275 - DNA, 120 bp, synthetic construct
  source 1..120: mol_type = other DNA
caaattcttctttaattccctaaaaaatatataatctttttctaactccatcttcctcctatacctaactcaaataaaaaccccctacttaataactaaaaaactcaaaaactcccaaac

SEQ ID NO: 3276 - DNA, 120 bp, synthetic construct
  source 1..120: mol_type = other DNA
taggtttttttttaattttttaaaaagtatgtagtttttttttagttttattttttttttatgtttggtttaagtaaaaattttttgtttggtgattagagaatttagaagtttttaggt

SEQ ID NO: 3277 - DNA, 120 bp, synthetic construct; identical to SEQ ID NO: 3273
  source 1..120: mol_type = other DNA

SEQ ID NO: 3278 - DNA, 120 bp, synthetic construct; identical to SEQ ID NO: 3274
  source 1..120: mol_type = other DNA

SEQ ID NO: 3279 - DNA, 120 bp, synthetic construct; identical to SEQ ID NO: 3275
  source 1..120: mol_type = other DNA

SEQ ID NO: 3280 - DNA, 120 bp, synthetic construct; identical to SEQ ID NO: 3276
  source 1..120: mol_type = other DNA

SEQ ID NO: 3281 - DNA, 120 bp, synthetic construct
  source 1..120: mol_type = other DNA
taaaataaataccttcatataaacaaattccttcataacaaaaaaacaaaataaatataaccataacacattatacctatatttataataatcacatttatttttcaaatttcaaaacaa

SEQ ID NO: 3282 - DNA, 120 bp, synthetic construct
  source 1..120: mol_type = other DNA
taaaataaatatttttatataggtaaatttttttatggtagagagatgagataaatatagttatgatatattgtgtttatgtttatgataattgtgtttgttttttaaattttgaaatga

SEQ ID NO: 3283 - DNA, 120 bp, synthetic construct
  source 1..120: mol_type = other DNA
taaaataaataccttcatataaacaaattccttcataacaaaaaaacaaaataaataaaaccaaaacacattatacctatatttataataatcacatttatttttcaaatttcaaaacaa

SEQ ID NO: 3284 - DNA, 120 bp, synthetic construct
  source 1..120: mol_type = other DNA
taaaataaatatttttatataggtaaatttttttatggtagagagatgagataaataaagttaagatatattgtgtttatgtttatgataattgtgtttgttttttaaattttgaaatga

SEQ ID NO: 3285 - DNA, 120 bp, synthetic construct
  source 1..120: mol_type = other DNA
taaaataaataccttcatataaacaaattccttcataacaaaaaaacgaaataaatataaccataacacattatacctatatttataataatcgcgtttatttttcaaatttcgaaacga

SEQ ID NO: 3286 - DNA, 120 bp, synthetic construct
  source 1..120: mol_type = other DNA
taaaataaatatttttatataggtaaatttttttatggtagagagacgagataaatatagttatgatatattgtgtttatgtttatgataatcgcgtttgttttttaaatttcgaaacga

SEQ ID NO: 3287 - DNA, 120 bp, synthetic construct
  source 1..120: mol_type = other DNA
taaaataaataccttcatataaacaaattccttcataacaaaaaaacgaaataaataaaaccaaaacacattatacctatatttataataatcgcgtttatttttcaaatttcgaaacga

SEQ ID NO: 3288 - DNA, 120 bp, synthetic construct
  source 1..120: mol_type = other DNA
taaaataaatatttttatataggtaaatttttttatggtagagagacgagataaataaagttaagatatattgtgtttatgtttatgataatcgcgtttgttttttaaatttcgaaacga

SEQ ID NO: 3289 - DNA, 120 bp, synthetic construct
  source 1..120: mol_type = other DNA
ctcctatttttcatttctcaaatcccctctatcctccaaaaaaaaaaataactactctataatacacctccacatacaaataaacacactaatatccacaaaaaccatacaacttactca

SEQ ID NO: 3290 - DNA, 120 bp, synthetic construct
  source 1..120: mol_type = other DNA
tttttgttttttattttttgagttttttttgttttttaggaaggaagatgattgttttatggtatatttttatatataggtgagtatattgatatttatagaggttatgtaatttgttta

SEQ ID NO: 3291 - DNA, 120 bp, synthetic construct
  source 1..120: mol_type = other DNA
ctcctatttttcatttctcaaatcccctctatcctccaaaaaaaaaaataactactctaaaaaacacctccacatacaaataaacacactaatatccacaaaaaccatacaacttactca

SEQ ID NO: 3292 - DNA, 120 bp, synthetic construct
  source 1..120: mol_type = other DNA
tttttgttttttattttttgagttttttttgttttttaggaaggaagatgattgttttaagggatatttttatatataggtgagtatattgatatttatagaggttatgtaatttgttta

SEQ ID NO: 3293 - DNA, 120 bp, synthetic construct
  source 1..120: mol_type = other DNA
ctcctatttttcatttctcgaatcccctctatcctccaaaaaaaaaaataactactctataatacacctccacatacaaataaacacactaatatccacaaaaaccatacaacttactca

SEQ ID NO: 3294 - DNA, 120 bp, synthetic construct
  source 1..120: mol_type = other DNA
tttttgttttttatttttcgagttttttttgttttttaggaaggaagatgattgttttatggtatatttttatatataggtgagtatattgatatttatagaggttatgtaatttgttta

SEQ ID NO: 3295 - DNA, 120 bp, synthetic construct
  source 1..120: mol_type = other DNA
ctcctatttttcatttctcgaatcccctctatcctccaaaaaaaaaaataactactctaaaaaacacctccacatacaaataaacacactaatatccacaaaaaccatacaacttactca

SEQ ID NO: 3296 - DNA, 120 bp, synthetic construct
  source 1..120: mol_type = other DNA
tttttgttttttatttttcgagttttttttgttttttaggaaggaagatgattgttttaagggatatttttatatataggtgagtatattgatatttatagaggttatgtaatttgttta

SEQ ID NO: 3297 - DNA, 120 bp, synthetic construct
  source 1..120: mol_type = other DNA
aaacaaaaccttaaacaaaaaaaaacaacattcaactaaaaaaaaccccaaccacaataatacataaatcctaactaactacaaaaaaaaaaaaacacaaaccaaaataaaatactctaa

SEQ ID NO: 3298 - DNA, 120 bp, synthetic construct
  source 1..120: mol_type = other DNA
gagtaaggttttagatagaaaggagtaatatttaattaaggaagattttggttatggtgatgtatgggttttggttagttgtgaggggagaggggtatgggttagggtaaaatgttttga

SEQ ID NO: 3299 - DNA, 120 bp, synthetic construct
  source 1..120: mol_type = other DNA
aaacaaaaccttaaacaaaaaaaaacaacattcaactaaaaaaaaccccaaccacaatactaaataaatcctaactaactacaaaaaaaaaaaaacacaaaccaaaataaaatactctaa

SEQ ID NO: 3300 - DNA, 120 bp, synthetic construct
  source 1..120: mol_type = other DNA
gagtaaggttttagatagaaaggagtaatatttaattaaggaagattttggttatggtgttggatgggttttggttagttgtgaggggagaggggtatgggttagggtaaaatgttttga

SEQ ID NO: 3301 - DNA, 120 bp, synthetic construct
  source 1..120: mol_type = other DNA
aaacaaaaccttaaacaaaaaaaaacaacattcaactaaaaaaaaccccgaccacgataatacataaatcctaactaactacgaaaaaaaaaaaacacgaaccaaaataaaatactctaa

SEQ ID NO: 3302 - DNA, 120 bp, synthetic construct
  source 1..120: mol_type = other DNA
gagtaaggttttagatagaaaggagtaatatttaattaaggaagatttcggttacggtgatgtatgggttttggttagttgcgaggggagaggggtacgggttagggtaaaatgttttga

SEQ ID NO: 3303 - DNA, 120 bp, synthetic construct
  source 1..120: mol_type = other DNA
aaacaaaaccttaaacaaaaaaaaacaacattcaactaaaaaaaaccccgaccacgatactaaataaatcctaactaactacgaaaaaaaaaaaacacgaaccaaaataaaatactctaa

SEQ ID NO: 3304 - DNA, 120 bp, synthetic construct
  source 1..120: mol_type = other DNA
gagtaaggttttagatagaaaggagtaatatttaattaaggaagatttcggttacggtgttggatgggttttggttagttgcgaggggagaggggtacgggttagggtaaaatgttttga

SEQ ID NO: 3305 - DNA, 120 bp, synthetic construct
  source 1..120: mol_type = other DNA
aaccttaaccatcccaacatccaaaactataaaaaataattatctataattcttaaatctccaataaatcaaacaaactaacaaaaactaatactaacaaataaaatattataacaaata

SEQ ID NO: 3306 - DNA, 120 bp, synthetic construct
  source 1..120: mol_type = other DNA
gattttggttgttttagtgtttagaattgtgagaaataattgtttgtggtttttaagtttttagtgaattaaatagattgatagaaattggtattgataagtaaggtgttataataaata

SEQ ID NO: 3307 - DNA, 120 bp, synthetic construct
  source 1..120: mol_type = other DNA
aaccttaaccatcccaacatccaaaactataaaaaataattatctataattcttaaatcacctataaatcaaacaaactaacaaaaactaatactaacaaataaaatattataacaaata

SEQ ID NO: 3308 - DNA, 120 bp, synthetic construct
  source 1..120: mol_type = other DNA
gattttggttgttttagtgtttagaattgtgagaaataattgtttgtggtttttaagttatttgtgaattaaatagattgatagaaattggtattgataagtaaggtgttataataaata

SEQ ID NO: 3309 - DNA, 120 bp, synthetic construct
  source 1..120: mol_type = other DNA
aaccttaaccgtcccaacgtccaaaactataaaaaataattatctataattcttaaatctccaataaatcaaacaaactaacaaaaactaatactaacaaataaaatattataacaaata

SEQ ID NO: 3310 - DNA, 120 bp, synthetic construct
  source 1..120: mol_type = other DNA
gattttggtcgttttagcgtttagaattgtgagaaataattgtttgtggtttttaagtttttagtgaattaaatagattgatagaaattggtattgataagtaaggtgttataataaata

SEQ ID NO: 3311 - DNA, 120 bp, synthetic construct
  source 1..120: mol_type = other DNA
aaccttaaccgtcccaacgtccaaaactataaaaaataattatctataattcttaaatcacctataaatcaaacaaactaacaaaaactaatactaacaaataaaatattataacaaata

SEQ ID NO: 3312 - DNA, 120 bp, synthetic construct
  source 1..120: mol_type = other DNA
gattttggtcgttttagcgtttagaattgtgagaaataattgtttgtggtttttaagttatttgtgaattaaatagattgatagaaattggtattgataagtaaggtgttataataaata

SEQ ID NO: 3313 - DNA, 120 bp, synthetic construct
  source 1..120: mol_type = other DNA
tttctaatttttttttaaaccataaaaaaccctactcccttttcaaacaaaatcctttaattcatcaacatataaaacaaataaaactaaactattccaccccaatccttcaccctcacc

SEQ ID NO: 3314 - DNA, 120 bp, synthetic construct
  source 1..120: mol_type = other DNA
tttttaatttttttttaagttataggaagttttgttttttttttaaataaaattttttagtttattaatatgtgaagtagataaaattgagttgttttattttaattttttatttttatt

SEQ ID NO: 3315 - DNA, 120 bp, synthetic construct
  source 1..120: mol_type = other DNA
tttctaatttttttttaaaccataaaaaaccctactcccttttcaaacaaaatcctttaaaacatcaacatataaaacaaataaaactaaactattccaccccaatccttcaccctcacc

SEQ ID NO: 3316 - DNA, 120 bp, synthetic construct
  source 1..120: mol_type = other DNA
tttttaatttttttttaagttataggaagttttgttttttttttaaataaaattttttagggtattaatatgtgaagtagataaaattgagttgttttattttaattttttatttttatt

SEQ ID NO: 3317 - DNA, 120 bp, synthetic construct; identical to SEQ ID NO: 3313
  source 1..120: mol_type = other DNA

SEQ ID NO: 3318 - DNA, 120 bp, synthetic construct; identical to SEQ ID NO: 3314
  source 1..120: mol_type = other DNA

SEQ ID NO: 3319 - DNA, 120 bp, synthetic construct; identical to SEQ ID NO: 3315
  source 1..120: mol_type = other DNA

SEQ ID NO: 3320 - DNA, 120 bp, synthetic construct; identical to SEQ ID NO: 3316
  source 1..120: mol_type = other DNA

SEQ ID NO: 3321 - DNA, 120 bp, synthetic construct
  source 1..120: mol_type = other DNA
atactcacttaacctacatttatatactattaaaaaaaaaacccaaaaaaactaaaaattaataaaaatcaaaataataaaaaccaaaaaaatttttaaaaaatctaaaaaatctactaa

SEQ ID NO: 3322 - DNA, 120 bp, synthetic construct
  source 1..120: mol_type = other DNA
gtgtttatttaatttgtatttgtgtattgttagggaagagatttaggaaaattgaagattggtgaaagttagaatagtggaggttagaaagatttttgaaagatttgaagaatttattgg

SEQ ID NO: 3323 - DNA, 120 bp, synthetic construct
  source 1..120: mol_type = other DNA
atactcacttaacctacatttatatactattaaaaaaaaaacccaaaaaaactaaaaatttttaaaaatcaaaataataaaaaccaaaaaaatttttaaaaaatctaaaaaatctactaa

SEQ ID NO: 3324 - DNA, 120 bp, synthetic construct
  source 1..120: mol_type = other DNA
gtgtttatttaatttgtatttgtgtattgttagggaagagatttaggaaaattgaagatttttgaaagttagaatagtggaggttagaaagatttttgaaagatttgaagaatttattgg

SEQ ID NO: 3325 - DNA, 120 bp, synthetic construct; identical to SEQ ID NO: 3321
  source 1..120: mol_type = other DNA

SEQ ID NO: 3326 - DNA, 120 bp, synthetic construct; identical to SEQ ID NO: 3322
  source 1..120: mol_type = other DNA

SEQ ID NO: 3327 - DNA, 120 bp, synthetic construct; identical to SEQ ID NO: 3323
  source 1..120: mol_type = other DNA

SEQ ID NO: 3328 - DNA, 120 bp, synthetic construct; identical to SEQ ID NO: 3324
  source 1..120: mol_type = other DNA

SEQ ID NO: 3329 - DNA, 120 bp, synthetic construct
  source 1..120: mol_type = other DNA
taacaacacaaacccctctaaaccaactaaaaaacccacacaacctaaacaaaaacaaatacctaacaaataaaaaactcaacccaactcactacccaacaactaaacacataaccttcc

SEQ ID NO: 3330 - DNA, 120 bp, synthetic construct
  source 1..120: mol_type = other DNA
tggtagtatagatttttttagattagttgagaggtttatatagtttgggtagaggtagatatttgataggtggggagtttagtttaatttattatttagtagttgggtatatggtttttt

SEQ ID NO: 3331 - DNA, 120 bp, synthetic construct
  source 1..120: mol_type = other DNA
taacaacacaaacccctctaaaccaactaaaaaacccacacaacctaaacaaaaacaaaaaactaacaaataaaaaactcaacccaactcactacccaacaactaaacacataaccttcc

SEQ ID NO: 3332 - DNA, 120 bp, synthetic construct
  source 1..120: mol_type = other DNA
tggtagtatagatttttttagattagttgagaggtttatatagtttgggtagaggtagaaaattgataggtggggagtttagtttaatttattatttagtagttgggtatatggtttttt

SEQ ID NO: 3333 - DNA, 120 bp, synthetic construct; identical to SEQ ID NO: 3329
  source 1..120: mol_type = other DNA

SEQ ID NO: 3334 - DNA, 120 bp, synthetic construct; identical to SEQ ID NO: 3330
  source 1..120: mol_type = other DNA

SEQ ID NO: 3335 - DNA, 120 bp, synthetic construct; identical to SEQ ID NO: 3331
  source 1..120: mol_type = other DNA

SEQ ID NO: 3336 - DNA, 120 bp, synthetic construct; identical to SEQ ID NO: 3332
  source 1..120: mol_type = other DNA

SEQ ID NO: 3337 - DNA, 120 bp, synthetic construct
  source 1..120: mol_type = other DNA
cataaaaaatcattatctaatcctcactaaatttattacaaaactacctacatatcaccaccaaaaaatacactatcatctaataaatctattattaataccttaaacttatatcaatta

SEQ ID NO: 3338 - DNA, 120 bp, synthetic construct
  source 1..120: mol_type = other DNA
tataaggagttattatttagtttttattaaatttattatagagttgtttatgtgttattattgaaaggtatattattatttgataaatttattgttgatattttaagtttatattagttg

SEQ ID NO: 3339 - DNA, 120 bp, synthetic construct
  source 1..120: mol_type = other DNA
cataaaaaatcattatctaatcctcactaaatttattacaaaactacctacatatcaccccaaaaaaatacactatcatctaataaatctattattaataccttaaacttatatcaatta

SEQ ID NO: 3340 - DNA, 120 bp, synthetic construct
  source 1..120: mol_type = other DNA
tataaggagttattatttagtttttattaaatttattatagagttgtttatgtgttattttagaaaggtatattattatttgataaatttattgttgatattttaagtttatattagttg

SEQ ID NO: 3341 - DNA, 120 bp, synthetic construct
  source 1..120: mol_type = other DNA
cataaaaaatcattatctaatcctcactaaatttattacaaaactacctacgtatcaccaccgaaaaatacactatcatctaataaatctattattaataccttaaacttatatcaatta

SEQ ID NO: 3342 - DNA, 120 bp, synthetic construct
  source 1..120: mol_type = other DNA
tataaggagttattatttagtttttattaaatttattatagagttgtttacgtgttattatcgaaaggtatattattatttgataaatttattgttgatattttaagtttatattagttg

SEQ ID NO: 3343 - DNA, 120 bp, synthetic construct
  source 1..120: mol_type = other DNA
cataaaaaatcattatctaatcctcactaaatttattacaaaactacctacgtatcaccccaaaaaaatacactatcatctaataaatctattattaataccttaaacttatatcaatta

SEQ ID NO: 3344 - DNA, 120 bp, synthetic construct
  source 1..120: mol_type = other DNA
tataaggagttattatttagtttttattaaatttattatagagttgtttacgtgttattttagaaaggtatattattatttgataaatttattgttgatattttaagtttatattagttg

SEQ ID NO: 3345 - DNA, 120 bp, synthetic construct
  source 1..120: mol_type = other DNA
aaatcaaaaacatccaccactccaaaattaccacatactaccataaacaaccactattcattcttctatcaacataaattttacctattctaaaaatttatataaataaaattattcaat

SEQ ID NO: 3346 - DNA, 120 bp, synthetic construct
  source 1..120: mol_type = other DNA
agattaaaaatatttattattttaaagttattatatattattataggtaattattgtttgtttttttattaatataaattttgtttgttttagaagtttatataaatagaattatttaat

SEQ ID NO: 3347 - DNA, 120 bp, synthetic construct
  source 1..120: mol_type = other DNA
aaatcaaaaacatccaccactccaaaattaccacatactaccataaacaaccactattcttacttctatcaacataaattttacctattctaaaaatttatataaataaaattattcaat

SEQ ID NO: 3348 - DNA, 120 bp, synthetic construct
  source 1..120: mol_type = other DNA
agattaaaaatatttattattttaaagttattatatattattataggtaattattgtttttatttttattaatataaattttgtttgttttagaagtttatataaatagaattatttaat

SEQ ID NO: 3349 - DNA, 120 bp, synthetic construct
  source 1..120: mol_type = other DNA
aaatcaaaaacatccaccactccaaaattaccacatactaccataaacaaccactattcgttcttctatcaacataaattttacctattctaaaaatttatataaataaaattattcaat

SEQ ID NO: 3350 - DNA, 120 bp, synthetic construct
  source 1..120: mol_type = other DNA
agattaaaaatatttattattttaaagttattatatattattataggtaattattgttcgtttttttattaatataaattttgtttgttttagaagtttatataaatagaattatttaat

SEQ ID NO: 3351 - DNA, 120 bp, synthetic construct; identical to SEQ ID NO: 3347
  source 1..120: mol_type = other DNA

SEQ ID NO: 3352 - DNA, 120 bp, synthetic construct; identical to SEQ ID NO: 3348
  source 1..120: mol_type = other DNA

SEQ ID NO: 3353 - DNA, 120 bp, synthetic construct
  source 1..120: mol_type = other DNA
ttaaacccatccttctaaaactctatactaaacctttacattatctacttatcaatcaaaaacctctcaaaaaaaataaaccacttaaatattaaaacaaaaaaatctaatacaaaaaac

SEQ ID NO: 3354 - DNA, 120 bp, synthetic construct
  source 1..120: mol_type = other DNA
ttggatttatttttttgaagttttgtattaagtttttgtattatttatttattagttagggattttttaagaaagataaattatttgagtattaaaatagaggggtttggtgtaggaaat

SEQ ID NO: 3355 - DNA, 120 bp, synthetic construct
  source 1..120: mol_type = other DNA
ttaaacccatccttctaaaactctatactaaacctttacattatctacttatcaatcaatatcctctcaaaaaaaataaaccacttaaatattaaaacaaaaaaatctaatacaaaaaac

SEQ ID NO: 3356 - DNA, 120 bp, synthetic construct
  source 1..120: mol_type = other DNA
ttggatttatttttttgaagttttgtattaagtttttgtattatttatttattagttagtgtttttttaagaaagataaattatttgagtattaaaatagaggggtttggtgtaggaaat

SEQ ID NO: 3357 - DNA, 120 bp, synthetic construct; identical to SEQ ID NO: 3353
  source 1..120: mol_type = other DNA

SEQ ID NO: 3358 - DNA, 120 bp, synthetic construct; identical to SEQ ID NO: 3354
  source 1..120: mol_type = other DNA

SEQ ID NO: 3359 - DNA, 120 bp, synthetic construct; identical to SEQ ID NO: 3355
  source 1..120: mol_type = other DNA

SEQ ID NO: 3360 - DNA, 120 bp, synthetic construct; identical to SEQ ID NO: 3356
  source 1..120: mol_type = other DNA

SEQ ID NO: 3361 - DNA, 120 bp, synthetic construct
  source 1..120: mol_type = other DNA
ctttcactttaattaaaaaaaccatattccttactataaatatatttatttaaataaatccttataaaaaaatactaacatcaaaaaaaatattacttaataattattatttataataac

SEQ ID NO: 3362 - DNA, 120 bp, synthetic construct
  source 1..120: mol_type = other DNA
tttttattttaattgaagaagttgtattttttgttataaatatgtttatttagatagatttttgtaaggaggtattaatattaaagaaaatattgtttaatggttattatttgtaataat

SEQ ID NO: 3363 - DNA, 120 bp, synthetic construct
  source 1..120: mol_type = other DNA
ctttcactttaattaaaaaaaccatattccttactataaatatatttatttaaataaatacatataaaaaaatactaacatcaaaaaaaatattacttaataattattatttataataac

SEQ ID NO: 3364 - DNA, 120 bp, synthetic construct
  source 1..120: mol_type = other DNA
tttttattttaattgaagaagttgtattttttgttataaatatgtttatttagatagatgtatgtaaggaggtattaatattaaagaaaatattgtttaatggttattatttgtaataat

SEQ ID NO: 3365 - DNA, 120 bp, synthetic construct
  source 1..120: mol_type = other DNA
ctttcactttaattaaaaaaaccgtattccttactataaatatatttatttaaataaatccttataaaaaaatactaacatcaaaaaaaatattacttaataattattatttataataac

SEQ ID NO: 3366 - DNA, 120 bp, synthetic construct
  source 1..120: mol_type = other DNA
tttttattttaattgaagaagtcgtattttttgttataaatatgtttatttagatagatttttgtaaggaggtattaatattaaagaaaatattgtttaatggttattatttgtaataac

SEQ ID NO: 3367 - DNA, 120 bp, synthetic construct
  source 1..120: mol_type = other DNA
ctttcactttaattaaaaaaaccgtattccttactataaatatatttatttaaataaatacatataaaaaaatactaacatcaaaaaaaatattacttaataattattatttataataac

SEQ ID NO: 3368 - DNA, 120 bp, synthetic construct
  source 1..120: mol_type = other DNA
tttttattttaattgaagaagtcgtattttttgttataaatatgtttatttagatagatgtatgtaaggaggtattaatattaaagaaaatattgtttaatggttattatttgtaataac

SEQ ID NO: 3369 - DNA, 120 bp, synthetic construct
  source 1..120: mol_type = other DNA
aaaatattcaatcccttaattattattatctataataactatacaaaccaaaaattaaaataacacacactataaacttaaaaaaacttacttttatcctaaaccaaatttaaaaactaa

SEQ ID NO: 3370 - DNA, 120 bp, synthetic construct
  source 1..120: mol_type = other DNA
aaaatatttaattttttggttattgttatttgtaatagttatgtagattaaaagttgaaataatatgtattataaatttaaagaaatttatttttattttgagttaagtttgaggattaa

SEQ ID NO: 3371 - DNA, 120 bp, synthetic construct
  source 1..120: mol_type = other DNA
aaaatattcaatcccttaattattattatctataataactatacaaaccaaaaataaaaataacaaacactataaacttaaaaaaacttacttttatcctaaaccaaatttaaaaactaa

SEQ ID NO: 3372 - DNA, 120 bp, synthetic construct
  source 1..120: mol_type = other DNA
aaaatatttaattttttggttattgttatttgtaatagttatgtagattaaaagtggaaataataggtattataaatttaaagaaatttatttttattttgagttaagtttgaggattaa

SEQ ID NO: 3373 - DNA, 120 bp, synthetic construct
  source 1..120: mol_type = other DNA
aaaatattcaatcccttaattattattatctataataactatacaaaccaaaaattaaaataacacgcactataaacttaaaaaaacttacttttatcctaaaccaaatttaaaaactaa

SEQ ID NO: 3374 - DNA, 120 bp, synthetic construct
  source 1..120: mol_type = other DNA
aaaatatttaattttttggttattgttatttgtaatagttatgtagattaaaagttgaaataatacgtattataaatttaaagaaatttatttttattttgagttaagtttgaggattaa

SEQ ID NO: 3375 - DNA, 120 bp, synthetic construct; identical to SEQ ID NO: 3371
  source 1..120: mol_type = other DNA

SEQ ID NO: 3376 - DNA, 120 bp, synthetic construct; identical to SEQ ID NO: 3372
  source 1..120: mol_type = other DNA

SEQ ID NO: 3377 - DNA, 120 bp, synthetic construct
  source 1..120: mol_type = other DNA
atatctcctcctcaaaacccaaaacaaaacctaacaaaacaaacatctaaaaattattcccctataaaaacctttaaatataaacaaattcatctaaaatctcacaactcccataaccta

SEQ ID NO: 3378 - DNA, 120 bp, synthetic construct
  source 1..120: mol_type = other DNA
gtgttttttttttagggtttaggatgaggtttggtagagtaggtatttggaaattgtttttttgtgaaagtttttaagtgtagataaatttatttgaaattttatagtttttatgatttg

SEQ ID NO: 3379 - DNA, 120 bp, synthetic construct
  source 1..120: mol_type = other DNA
atatctcctcctcaaaacccaaaacaaaacctaacaaaacaaacatctaaaaattattacccaataaaaacctttaaatataaacaaattcatctaaaatctcacaactcccataaccta

SEQ ID NO: 3380 - DNA, 120 bp, synthetic construct
  source 1..120: mol_type = other DNA
gtgttttttttttagggtttaggatgaggtttggtagagtaggtatttggaaattgttgtttagtgaaagtttttaagtgtagataaatttatttgaaattttatagtttttatgatttg

SEQ ID NO: 3381 - DNA, 120 bp, synthetic construct
  source 1..120: mol_type = other DNA
atatctcctcctcaaaacccaaaacgaaacctaacaaaacaaacatctaaaaattattcccctataaaaacctttaaatataaacaaattcatctaaaatctcacaactcccataaccta

SEQ ID NO: 3382 - DNA, 120 bp, synthetic construct
  source 1..120: mol_type = other DNA
gtgttttttttttagggtttaggacgaggtttggtagagtaggtatttggaaattgtttttttgtgaaagtttttaagtgtagataaatttatttgaaattttatagtttttatgatttg

SEQ ID NO: 3383 - DNA, 120 bp, synthetic construct
  source 1..120: mol_type = other DNA
atatctcctcctcaaaacccaaaacgaaacctaacaaaacaaacatctaaaaattattacccaataaaaacctttaaatataaacaaattcatctaaaatctcacaactcccataaccta

SEQ ID NO: 3384 - DNA, 120 bp, synthetic construct
  source 1..120: mol_type = other DNA
gtgttttttttttagggtttaggacgaggtttggtagagtaggtatttggaaattgttgtttagtgaaagtttttaagtgtagataaatttatttgaaattttatagtttttatgatttg

SEQ ID NO: 3385 - DNA, 120 bp, synthetic construct
  source 1..120: mol_type = other DNA
aattacacttactaactacatcaaatatttctattaaaaaaaaaaaaacaccccactctcaaaatccaaattaaaaaaaaaataactattcttaaatatcatcactaccaatctacccta

SEQ ID NO: 3386 - DNA, 120 bp, synthetic construct
  source 1..120: mol_type = other DNA
aattatgtttgttggttgtattgaatatttttgttgaagaagaaagaatattttatttttaggatttaaattgagaaaaggatagttgtttttggatgttattattgttaatttgttttg

SEQ ID NO: 3387 - DNA, 120 bp, synthetic construct
  source 1..120: mol_type = other DNA
aattacacttactaactacatcaaatatttctattaaaaaaaaaaaaacaccccactcacaacatccaaattaaaaaaaaaataactattcttaaatatcatcactaccaatctacccta

SEQ ID NO: 3388 - DNA, 120 bp, synthetic construct
  source 1..120: mol_type = other DNA
aattatgtttgttggttgtattgaatatttttgttgaagaagaaagaatattttatttgtagtatttaaattgagaaaaggatagttgtttttggatgttattattgttaatttgttttg

SEQ ID NO: 3389 - DNA, 120 bp, synthetic construct
  source 1..120: mol_type = other DNA
aattacgcttactaactacatcgaatatttctattaaaaaaaaaaaaacaccccactctcaaaatccaaattaaaaaaaaaataactattcttaaatatcatcactaccaatctacccta

SEQ ID NO: 3390 - DNA, 120 bp, synthetic construct
  source 1..120: mol_type = other DNA
aattacgtttgttggttgtatcgaatatttttgttgaagaagaaagaatattttatttttaggatttaaattgagaaaaggatagttgtttttggatgttattattgttaatttgttttg

SEQ ID NO: 3391 - DNA, 120 bp, synthetic construct
  source 1..120: mol_type = other DNA
aattacgcttactaactacatcgaatatttctattaaaaaaaaaaaaacaccccactcgcaacatccaaattaaaaaaaaaataactattcttaaatatcatcactaccaatctacccta

SEQ ID NO: 3392 - DNA, 120 bp, synthetic construct
  source 1..120: mol_type = other DNA
aattacgtttgttggttgtatcgaatatttttgttgaagaagaaagaatattttattcgtagtatttaaattgagaaaaggatagttgtttttggatgttattattgttaatttgttttg

SEQ ID NO: 3393 - DNA, 120 bp, synthetic construct
  source 1..120: mol_type = other DNA
aaatataaaaatcaatacatataccataaaaataataccatacacaaaaataaaaaatacaacaacaaaaaattccactttccattccaaaacccctaaaaaacccaacctaaacaactc

SEQ ID NO: 3394 - DNA, 120 bp, synthetic construct
  source 1..120: mol_type = other DNA
aaatgtggaaattagtgtatatgttatgggagtgatgttgtgtataaaggtagaaggtgtagtagtaggagattttattttttattttaaggtttttgggaagtttagtttgagtgattt

SEQ ID NO: 3395 - DNA, 120 bp, synthetic construct
  source 1..120: mol_type = other DNA
aaatataaaaatcaatacatataccataaaaataataccatacacaaaaataaaaattacaacaaaaaaaaattccactttccattccaaaacccctaaaaaacccaacctaaacaactc

SEQ ID NO: 3396 - DNA, 120 bp, synthetic construct
  source 1..120: mol_type = other DNA
aaatgtggaaattagtgtatatgttatgggagtgatgttgtgtataaaggtagaagttgtagtagaaggagattttattttttattttaaggtttttgggaagtttagtttgagtgattt

SEQ ID NO: 3397 - DNA, 120 bp, synthetic construct
  source 1..120: mol_type = other DNA
aaatataaaaatcaatacatataccataaaaataataccgtacacaaaaataaaaaatacaacaacaaaaaattccactttccattccaaaacccctaaaaaacccaacctaaacgactc

SEQ ID NO: 3398 - DNA, 120 bp, synthetic construct
  source 1..120: mol_type = other DNA
aaatgtggaaattagtgtatatgttatgggagtgatgtcgtgtataaaggtagaaggtgtagtagtaggagattttattttttattttaaggtttttgggaagtttagtttgagcgattt

SEQ ID NO: 3399 - DNA, 120 bp, synthetic construct
  source 1..120: mol_type = other DNA
aaatataaaaatcaatacatataccataaaaataataccgtacacaaaaataaaaattacaacaaaaaaaaattccactttccattccaaaacccctaaaaaacccaacctaaacgactc

SEQ ID NO: 3400 - DNA, 120 bp, synthetic construct
  source 1..120: mol_type = other DNA
aaatgtggaaattagtgtatatgttatgggagtgatgtcgtgtataaaggtagaagttgtagtagaaggagattttattttttattttaaggtttttgggaagtttagtttgagcgattt

SEQ ID NO: 3401 - DNA, 120 bp, synthetic construct
  source 1..120: mol_type = other DNA
aaacaaaacttttaatcataaaaataataaatattcattctttaattaaaaaacaaaacaaacaaaatccttaatccctcttattaccaaatataaccatatttactcctaatactaccc

SEQ ID NO: 3402 - DNA, 120 bp, synthetic construct
  source 1..120: mol_type = other DNA
aggtaagatttttaattatgggaatggtgaatgtttattttttaattgaggggtaaagtaggtaggatttttggttttttttgttgttagatgtggttgtgtttgtttttagtattgttt

SEQ ID NO: 3403 - DNA, 120 bp, synthetic construct
  source 1..120: mol_type = other DNA
aaacaaaacttttaatcataaaaataataaatattcattctttaattaaaaaacaaaccaaacacaatccttaatccctcttattaccaaatataaccatatttactcctaatactaccc

SEQ ID NO: 3404 - DNA, 120 bp, synthetic construct
  source 1..120: mol_type = other DNA
aggtaagatttttaattatgggaatggtgaatgtttattttttaattgaggggtaaattaggtatgatttttggttttttttgttgttagatgtggttgtgtttgtttttagtattgttt

SEQ ID NO: 3405 - DNA, 120 bp, synthetic construct
  source 1..120: mol_type = other DNA
aaacaaaacttttaatcataaaaataataaatattcattctttaattaaaaaacaaaacaaacaaaatccttaatccctcttattaccaaatataaccgtatttactcctaatactaccc

SEQ ID NO: 3406 - DNA, 120 bp, synthetic construct
  source 1..120: mol_type = other DNA
aggtaagatttttaattatgggaatggtgaatgtttattttttaattgaggggtaaagtaggtaggatttttggttttttttgttgttagatgtggtcgtgtttgtttttagtattgttt

SEQ ID NO: 3407 - DNA, 120 bp, synthetic construct
  source 1..120: mol_type = other DNA
aaacaaaacttttaatcataaaaataataaatattcattctttaattaaaaaacaaaccaaacacgatccttaatccctcttattaccaaatataaccgtatttactcctaatactaccc

SEQ ID NO: 3408 - DNA, 120 bp, synthetic construct
  source 1..120: mol_type = other DNA
aggtaagatttttaattatgggaatggtgaatgtttattttttaattgaggggtaaattaggtacgatttttggttttttttgttgttagatgtggtcgtgtttgtttttagtattgttt

SEQ ID NO: 3409 - DNA, 120 bp, synthetic construct
  source 1..120: mol_type = other DNA
catattatttccttttaatttataattatttaaaactaaaatttaaaaaatctaatttataaaataacaacacaaaatttacaaaaaaaacttaaaaatctatacataaatatatctacc

SEQ ID NO: 3410 - DNA, 120 bp, synthetic construct
  source 1..120: mol_type = other DNA
tatattatttttttttaatttataattgtttaaaattaaaatttaaagaatttgatttatgaaatggtaatataaaatttataggaaaagtttaagaatttatgtataaatgtgtttgtt

SEQ ID NO: 3411 - DNA, 120 bp, synthetic construct
  source 1..120: mol_type = other DNA
catattatttccttttaatttataattatttaaaactaaaatttaaaaaatctaatttttaaattaacaacacaaaatttacaaaaaaaacttaaaaatctatacataaatatatctacc

SEQ ID NO: 3412 - DNA, 120 bp, synthetic construct
  source 1..120: mol_type = other DNA
tatattatttttttttaatttataattgtttaaaattaaaatttaaagaatttgatttttgaattggtaatataaaatttataggaaaagtttaagaatttatgtataaatgtgtttgtt

SEQ ID NO: 3413 - DNA, 120 bp, synthetic construct; identical to SEQ ID NO: 3409
  source 1..120: mol_type = other DNA

SEQ ID NO: 3414 - DNA, 120 bp, synthetic construct; identical to SEQ ID NO: 3410
  source 1..120: mol_type = other DNA

SEQ ID NO: 3415 - DNA, 120 bp, synthetic construct; identical to SEQ ID NO: 3411
  source 1..120: mol_type = other DNA

SEQ ID NO: 3416 - DNA, 120 bp, synthetic construct; identical to SEQ ID NO: 3412
  source 1..120: mol_type = other DNA

SEQ ID NO: 3417 - DNA, 120 bp, synthetic construct
  source 1..120: mol_type = other DNA
attttaaacaaaaaaataacccatacatattatttttaaaatttttactctaactaaatataaaacaaaacttaaaaaaaaaactattaacaataacacacataaaaaaaataataacct

SEQ ID NO: 3418 - DNA, 120 bp, synthetic construct
  source 1..120: mol_type = other DNA
gttttaagtagaaaagtgatttatatatattgtttttaaaatttttattttggttgagtgtgggataggatttagggagaaggttgttaatagtagtatatgtgagagaaatgatgattt

SEQ ID NO: 3419 - DNA, 120 bp, synthetic construct
  source 1..120: mol_type = other DNA
attttaaacaaaaaaataacccatacatattatttttaaaatttttactctaactaaaaataacacaaaacttaaaaaaaaaactattaacaataacacacataaaaaaaataataacct

SEQ ID NO: 3420 - DNA, 120 bp, synthetic construct
  source 1..120: mol_type = other DNA
gttttaagtagaaaagtgatttatatatattgtttttaaaatttttattttggttgagagtggtataggatttagggagaaggttgttaatagtagtatatgtgagagaaatgatgattt

SEQ ID NO: 3421 - DNA, 120 bp, synthetic construct
  source 1..120: mol_type = other DNA
attttaaacaaaaaaataacccatacatattatttttaaaatttttactctaactaaatataaaacaaaacttaaaaaaaaaactattaacaataacacacgtaaaaaaaataataacct

SEQ ID NO: 3422 - DNA, 120 bp, synthetic construct
  source 1..120: mol_type = other DNA
gttttaagtagaaaagtgatttatatatattgtttttaaaatttttattttggttgagtgtgggataggatttagggagaaggttgttaatagtagtatacgtgagagaaatgatgattt

SEQ ID NO: 3423 - DNA, 120 bp, synthetic construct
  source 1..120: mol_type = other DNA
attttaaacaaaaaaataacccatacatattatttttaaaatttttactctaactaaaaataacacaaaacttaaaaaaaaaactattaacaataacacacgtaaaaaaaataataacct

SEQ ID NO: 3424 - DNA, 120 bp, synthetic construct
  source 1..120: mol_type = other DNA
gttttaagtagaaaagtgatttatatatattgtttttaaaatttttattttggttgagagtggtataggatttagggagaaggttgttaatagtagtatacgtgagagaaatgatgattt

SEQ ID NO: 3425 - DNA, 120 bp, synthetic construct
  source 1..120: mol_type = other DNA
ccaaaccctactcccctccccatctctataaccatttcctaaccattatcaatatcaataaataattcctcaaaaaattaatacttttaccaaaatttctcaatcatcttaaataccctt

SEQ ID NO: 3426 - DNA, 120 bp, synthetic construct
  source 1..120: mol_type = other DNA
ttaagttttgtttttttttttatttttgtagttattttttggttattgttagtgttaataaataattttttaaggaattaatgtttttattaaggttttttaattattttaaatgttttt

SEQ ID NO: 3427 - DNA, 120 bp, synthetic construct
  source 1..120: mol_type = other DNA
ccaaaccctactcccctccccatctctataaccatttcctaaccattatcaatatccataaatatttcctcaaaaaattaatacttttaccaaaatttctcaatcatcttaaataccctt

SEQ ID NO: 3428 - DNA, 120 bp, synthetic construct
  source 1..120: mol_type = other DNA
ttaagttttgtttttttttttatttttgtagttattttttggttattgttagtgtttataaatatttttttaaggaattaatgtttttattaaggttttttaattattttaaatgttttt

SEQ ID NO: 3429 - DNA, 120 bp, synthetic construct; identical to SEQ ID NO: 3425
  source 1..120: mol_type = other DNA

SEQ ID NO: 3430 - DNA, 120 bp, synthetic construct; identical to SEQ ID NO: 3426
  source 1..120: mol_type = other DNA

SEQ ID NO: 3431 - DNA, 120 bp, synthetic construct; identical to SEQ ID NO: 3427
  source 1..120: mol_type = other DNA

SEQ ID NO: 3432 - DNA, 120 bp, synthetic construct; identical to SEQ ID NO: 3428
  source 1..120: mol_type = other DNA

SEQ ID NO: 3433 - DNA, 120 bp, synthetic construct
  source 1..120: mol_type = other DNA
aaatatttttaaaaccaaaaaccaatatatatcaacttctttttacccattatttatatcctaaacaaaaaaataactcactaaatctaaatcacaaaacaattaaaaaccccaaaaaaa

SEQ ID NO: 3434 - DNA, 120 bp, synthetic construct
  source 1..120: mol_type = other DNA
aggtatttttaagattgagagttagtgtgtgttagtttttttttgtttattgtttgtgttttgggtaggaagatgatttattagatttgaattataaggtaattaagagttttaggaaag

SEQ ID NO: 3435 - DNA, 120 bp, synthetic construct
  source 1..120: mol_type = other DNA
aaatatttttaaaaccaaaaaccaatatatatcaacttctttttacccattatttatatacttaacaaaaaaataactcactaaatctaaatcacaaaacaattaaaaaccccaaaaaaa

SEQ ID NO: 3436 - DNA, 120 bp, synthetic construct
  source 1..120: mol_type = other DNA
aggtatttttaagattgagagttagtgtgtgttagtttttttttgtttattgtttgtgtgtttggtaggaagatgatttattagatttgaattataaggtaattaagagttttaggaaag

SEQ ID NO: 3437 - DNA, 120 bp, synthetic construct
  source 1..120: mol_type = other DNA
aaatatttttaaaaccgaaaaccaatatatatcaacttctttttacccattatttatatcctaaacaaaaaaataactcactaaatctaaatcacaaaacaattaaaaaccccaaaaaaa

SEQ ID NO: 3438 - DNA, 120 bp, synthetic construct
  source 1..120: mol_type = other DNA
aggtatttttaagatcgagagttagtgtgtgttagtttttttttgtttattgtttgtgttttgggtaggaagatgatttattagatttgaattataaggtaattaagagttttaggaaag

SEQ ID NO: 3439 - DNA, 120 bp, synthetic construct
  source 1..120: mol_type = other DNA
aaatatttttaaaaccgaaaaccaatatatatcaacttctttttacccattatttatatacttaacaaaaaaataactcactaaatctaaatcacaaaacaattaaaaaccccaaaaaaa

SEQ ID NO: 3440 - DNA, 120 bp, synthetic construct
  source 1..120: mol_type = other DNA
aggtatttttaagatcgagagttagtgtgtgttagtttttttttgtttattgtttgtgtgtttggtaggaagatgatttattagatttgaattataaggtaattaagagttttaggaaag

SEQ ID NO: 3441 - DNA, 120 bp, synthetic construct
  source 1..120: mol_type = other DNA
atcaaaaaatctaaatttttaatctaatataacaaaaataccacatattataataaatactaatattttcacatttaataaaaattatttctttaatataaattttaaaaatctatttca

SEQ ID NO: 3442 - DNA, 120 bp, synthetic construct
  source 1..120: mol_type = other DNA
gttaaaaaatttggatttttgatttaatataataggaatattatatgttgtgatagatattaatgtttttatatttagtagaaattatttttttgatgtaaattttaaaaatttatttta

SEQ ID NO: 3443 - DNA, 120 bp, synthetic construct
  source 1..120: mol_type = other DNA
atcaaaaaatctaaatttttaatctaatataacaaaaataccacatattataataaaaactaattttttcacatttaataaaaattatttctttaatataaattttaaaaatctatttca

SEQ ID NO: 3444 - DNA, 120 bp, synthetic construct
  source 1..120: mol_type = other DNA
gttaaaaaatttggatttttgatttaatataataggaatattatatgttgtgatagaaattaatttttttatatttagtagaaattatttttttgatgtaaattttaaaaatttatttta

SEQ ID NO: 3445 - DNA, 120 bp, synthetic construct; identical to SEQ ID NO: 3441
  source 1..120: mol_type = other DNA

SEQ ID NO: 3446 - DNA, 120 bp, synthetic construct; identical to SEQ ID NO: 3442
  source 1..120: mol_type = other DNA

SEQ ID NO: 3447 - DNA, 120 bp, synthetic construct; identical to SEQ ID NO: 3443
  source 1..120: mol_type = other DNA

SEQ ID NO: 3448 - DNA, 120 bp, synthetic construct; identical to SEQ ID NO: 3444
  source 1..120: mol_type = other DNA

SEQ ID NO: 3449 - DNA, 120 bp, synthetic construct
  source 1..120: mol_type = other DNA
ttaacataataaaacccattcataatattaaaaaacacaacaactttacatataaactctaaatttaaaatttactttttttataaacccataataataacatttaaattccatatttat

SEQ ID NO: 3450 - DNA, 120 bp, synthetic construct
  source 1..120: mol_type = other DNA
ttaatatgatgaggtttatttataatgttgagaaatatagtagttttatatataaattttaaatttgggatttgttttttttgtaagtttatgatgatgatatttaaattttatgtttat

SEQ ID NO: 3451 - DNA, 120 bp, synthetic construct
  source 1..120: mol_type = other DNA
ttaacataataaaacccattcataatattaaaaaacacaacaactttacatataaaatctaaatataaaatttactttttttataaacccataataataacatttaaattccatatttat

SEQ ID NO: 3452 - DNA, 120 bp, synthetic construct
  source 1..120: mol_type = other DNA
ttaatatgatgaggtttatttataatgttgagaaatatagtagttttatatataaagtttaaatatgggatttgttttttttgtaagtttatgatgatgatatttaaattttatgtttat

SEQ ID NO: 3453 - DNA, 120 bp, synthetic construct; identical to SEQ ID NO: 3449
  source 1..120: mol_type = other DNA

SEQ ID NO: 3454 - DNA, 120 bp, synthetic construct; identical to SEQ ID NO: 3450
  source 1..120: mol_type = other DNA

SEQ ID NO: 3455 - DNA, 120 bp, synthetic construct; identical to SEQ ID NO: 3451
  source 1..120: mol_type = other DNA

SEQ ID NO: 3456 - DNA, 120 bp, synthetic construct; identical to SEQ ID NO: 3452
  source 1..120: mol_type = other DNA

SEQ ID NO: 3457 - DNA, 120 bp, synthetic construct
  source 1..120: mol_type = other DNA
cccaacaatatcaataaactaaaacctcatactcctaaatcctaacaaaacacaaaactaatacaaaaaacttctcctaaactatataaccccttaacaatattcctaccatacaaaaac

SEQ ID NO: 3458 - DNA, 120 bp, synthetic construct
  source 1..120: mol_type = other DNA
tttagtagtgttagtgagttggggttttgtgtttttgggttttggtggggtatgaggttggtatggggagttttttttagattgtgtggttttttagtagtgtttttattgtgtaaaggt

SEQ ID NO: 3459 - DNA, 120 bp, synthetic construct
  source 1..120: mol_type = other DNA
cccaacaatatcaataaactaaaacctcatactcctaaatcctaacaaaacacaaaaataataccaaaaacttctcctaaactatataaccccttaacaatattcctaccatacaaaaac

SEQ ID NO: 3460 - DNA, 120 bp, synthetic construct
  source 1..120: mol_type = other DNA
tttagtagtgttagtgagttggggttttgtgtttttgggttttggtggggtatgagggtggtattgggagttttttttagattgtgtggttttttagtagtgtttttattgtgtaaaggt

SEQ ID NO: 3461 - DNA, 120 bp, synthetic construct
  source 1..120: mol_type = other DNA
cccaacaatatcaataaactaaaacctcgtactcctaaatcctaacgaaacacgaaactaatacgaaaaacttctcctaaactatataaccccttaacaatattcctaccgtacaaaaac

SEQ ID NO: 3462 - DNA, 120 bp, synthetic construct
  source 1..120: mol_type = other DNA
tttagtagtgttagtgagttggggtttcgtgtttttgggttttggcggggtacgaggttggtacggggagttttttttagattgtgtggttttttagtagtgtttttatcgtgtaaaggt

SEQ ID NO: 3463 - DNA, 120 bp, synthetic construct
  source 1..120: mol_type = other DNA
cccaacaatatcaataaactaaaacctcgtactcctaaatcctaacgaaacacgaaaataataccgaaaacttctcctaaactatataaccccttaacaatattcctaccgtacaaaaac

SEQ ID NO: 3464 - DNA, 120 bp, synthetic construct
  source 1..120: mol_type = other DNA
tttagtagtgttagtgagttggggtttcgtgtttttgggttttggcggggtacgagggtggtatcgggagttttttttagattgtgtggttttttagtagtgtttttatcgtgtaaaggt

SEQ ID NO: 3465 - DNA, 120 bp, synthetic construct
  source 1..120: mol_type = other DNA
aaacctcacatttattataactttttatttattttttttttttttaaaaaaaaacaaaacacatattaataaataaaacattttattttaaaatttattattaacataacctataactca

SEQ ID NO: 3466 - DNA, 120 bp, synthetic construct
  source 1..120: mol_type = other DNA
gggttttatatttgttgtggttttttgtttattttttttttttttgaaaaagagtagagtatatgttgataggtagaatattttattttaaagtttattgttaatataatttgtggttta

SEQ ID NO: 3467 - DNA, 120 bp, synthetic construct
  source 1..120: mol_type = other DNA
aaacctcacatttattataactttttatttattttttttttttttaaaaaaaaacaaaccacttattaataaataaaacattttattttaaaatttattattaacataacctataactca

SEQ ID NO: 3468 - DNA, 120 bp, synthetic construct
  source 1..120: mol_type = other DNA
gggttttatatttgttgtggttttttgtttattttttttttttttgaaaaagagtagattatttgttgataggtagaatattttattttaaagtttattgttaatataatttgtggttta

SEQ ID NO: 3469 - DNA, 120 bp, synthetic construct; identical to SEQ ID NO: 3465
  source 1..120: mol_type = other DNA

SEQ ID NO: 3470 - DNA, 120 bp, synthetic construct; identical to SEQ ID NO: 3466
  source 1..120: mol_type = other DNA

SEQ ID NO: 3471 - DNA, 120 bp, synthetic construct; identical to SEQ ID NO: 3467
  source 1..120: mol_type = other DNA

SEQ ID NO: 3472 - DNA, 120 bp, synthetic construct; identical to SEQ ID NO: 3468
  source 1..120: mol_type = other DNA

SEQ ID NO: 3473 - DNA, 120 bp, synthetic construct
  source 1..120: mol_type = other DNA
acactaaaacaaatttattaatttacttaaaattacattaaaataatttaaaaaaaaaaaccctaatatctaaaaactcctttttaccaaataatataaacaaaaaactaaaacattttt

SEQ ID NO: 3474 - DNA, 120 bp, synthetic construct
  source 1..120: mol_type = other DNA
atattgaggtaagtttattaatttgtttaaaattatattaaaataatttaaagaggaaagttttaatgtttgaagatttttttttgttaagtgatataagtagaaagttaaaatgttttt

SEQ ID NO: 3475 - DNA, 120 bp, synthetic construct
  source 1..120: mol_type = other DNA
acactaaaacaaatttattaatttacttaaaattacattaaaataatttaaaaaaaaataccataatatctaaaaactcctttttaccaaataatataaacaaaaaactaaaacattttt

SEQ ID NO: 3476 - DNA, 120 bp, synthetic construct
  source 1..120: mol_type = other DNA
atattgaggtaagtttattaatttgtttaaaattatattaaaataatttaaagaggaatgttataatgtttgaagatttttttttgttaagtgatataagtagaaagttaaaatgttttt

SEQ ID NO: 3477 - DNA, 120 bp, synthetic construct
  source 1..120: mol_type = other DNA
acactaaaacaaatttattaatttacttaaaattacattaaaataatttaaaaaaaaaaaccctaatatctaaaaactcctttttaccaaataatataaacaaaaaactaaaacgttttt

SEQ ID NO: 3478 - DNA, 120 bp, synthetic construct
  source 1..120: mol_type = other DNA
atattgaggtaagtttattaatttgtttaaaattatattaaaataatttaaagaggaaagttttaatgtttgaagatttttttttgttaagtgatataagtagaaagttaaaacgttttt

SEQ ID NO: 3479 - DNA, 120 bp, synthetic construct
  source 1..120: mol_type = other DNA
acactaaaacaaatttattaatttacttaaaattacattaaaataatttaaaaaaaaataccataatatctaaaaactcctttttaccaaataatataaacaaaaaactaaaacgttttt

SEQ ID NO: 3480 - DNA, 120 bp, synthetic construct
  source 1..120: mol_type = other DNA
atattgaggtaagtttattaatttgtttaaaattatattaaaataatttaaagaggaatgttataatgtttgaagatttttttttgttaagtgatataagtagaaagttaaaacgttttt

SEQ ID NO: 3481 - DNA, 120 bp, synthetic construct
  source 1..120: mol_type = other DNA
ctaaaatctaaaaaaaaaacaaaaacaatcacaaaattaaaataaacaaaataaaaaaacaccaataaaaaaccttaaaataataaaaaaatttaaccaaacatatcaaatacaaaaaaa

SEQ ID NO: 3482 - DNA, 120 bp, synthetic construct
  source 1..120: mol_type = other DNA
ttgaggtttgggagaagagtgaggatggttataagattaaaatggatagaataagaaggtattagtagagagttttgagataatggaaaggtttaattaaatgtattaagtgtaaagaaa

SEQ ID NO: 3483 - DNA, 120 bp, synthetic construct
  source 1..120: mol_type = other DNA
ctaaaatctaaaaaaaaaacaaaaacaatcacaaaattaaaataaacaaaataaaacaacaccaaaaaaaaaccttaaaataataaaaaaatttaaccaaacatatcaaatacaaaaaaa

SEQ ID NO: 3484 - DNA, 120 bp, synthetic construct
  source 1..120: mol_type = other DNA
ttgaggtttgggagaagagtgaggatggttataagattaaaatggatagaataagatggtattagaagagagttttgagataatggaaaggtttaattaaatgtattaagtgtaaagaaa

SEQ ID NO: 3485 - DNA, 120 bp, synthetic construct
  source 1..120: mol_type = other DNA
ctaaaatctaaaaaaaaaacgaaaacgatcacaaaattaaaataaacaaaataaaaaaacaccaataaaaaaccttaaaataataaaaaaatttaaccaaacgtatcaaatacaaaaaaa

SEQ ID NO: 3486 - DNA, 120 bp, synthetic construct
  source 1..120: mol_type = other DNA
ttgaggtttgggagaagagcgaggacggttataagattaaaatggatagaataagaaggtattagtagagagttttgagataatggaaaggtttaattaaacgtattaagtgtaaagaaa

SEQ ID NO: 3487 - DNA, 120 bp, synthetic construct
  source 1..120: mol_type = other DNA
ctaaaatctaaaaaaaaaacgaaaacgatcacaaaattaaaataaacaaaataaaacgacaccaaaaaaaaaccttaaaataataaaaaaatttaaccaaacgtatcaaatacaaaaaaa

SEQ ID NO: 3488 - DNA, 120 bp, synthetic construct
  source 1..120: mol_type = other DNA
ttgaggtttgggagaagagcgaggacggttataagattaaaatggatagaataagacggtattagaagagagttttgagataatggaaaggtttaattaaacgtattaagtgtaaagaaa

SEQ ID NO: 3489 - DNA, 120 bp, synthetic construct
  source 1..120: mol_type = other DNA
aatcatataactttaaatatatatactaaaattacaataatattactaacccatattacctcaaatatactctaaaaaacataaattaaataaaacattaataactacaattcaaataaa

SEQ ID NO: 3490 - DNA, 120 bp, synthetic construct
  source 1..120: mol_type = other DNA
ggttatgtgattttggatgtgtgtgttgaaattgtagtggtgttattggtttatgttgttttaagtgtgttttggggagtatgagttgagtgggatattaatagttatgatttaaataag

SEQ ID NO: 3491 - DNA, 120 bp, synthetic construct
  source 1..120: mol_type = other DNA
aatcatataactttaaatatatatactaaaattacaataatattactaacccatatttcctcacatatactctaaaaaacataaattaaataaaacattaataactacaattcaaataaa

SEQ ID NO: 3492 - DNA, 120 bp, synthetic construct
  source 1..120: mol_type = other DNA
ggttatgtgattttggatgtgtgtgttgaaattgtagtggtgttattggtttatgtttttttatgtgtgttttggggagtatgagttgagtgggatattaatagttatgatttaaataag

SEQ ID NO: 3493 - DNA, 120 bp, synthetic construct
  source 1..120: mol_type = other DNA
aatcatataactttaaatatatatactaaaattacaataatattactaacccatattacctcaaatatactctaaaaaacataaattaaataaaacattaataactacgattcaaataaa

SEQ ID NO: 3494 - DNA, 120 bp, synthetic construct
  source 1..120: mol_type = other DNA
ggttatgtgattttggatgtgtgtgttgaaattgtagtggtgttattggtttatgttgttttaagtgtgttttggggagtatgagttgagtgggatattaatagttacgatttaaataag

SEQ ID NO: 3495 - DNA, 120 bp, synthetic construct
  source 1..120: mol_type = other DNA
aatcatataactttaaatatatatactaaaattacaataatattactaacccatatttcctcacgtatactctaaaaaacataaattaaataaaacattaataactacgattcaaataaa

SEQ ID NO: 3496 - DNA, 120 bp, synthetic construct
  source 1..120: mol_type = other DNA
ggttatgtgattttggatgtgtgtgttgaaattgtagtggtgttattggtttatgtttttttacgtgtgttttggggagtatgagttgagtgggatattaatagttacgatttaaataag

SEQ ID NO: 3497 - DNA, 120 bp, synthetic construct
  source 1..120: mol_type = other DNA
aaaaaaaaaaatatacaaaatataaatttaaaaaacaaaaaaaataactccaaatatctaacaatatttttcttaatacaaaacatataaatcctaattaccttcaaacaactatcaccc

SEQ ID NO: 3498 - DNA, 120 bp, synthetic construct
  source 1..120: mol_type = other DNA
aaaaaagaaaatgtataagatataaatttaaaaaatagaaaaggtagttttagatatttgataatattttttttaatatagaatatatagattttaattgtttttaaatagttattgttt

SEQ ID NO: 3499 - DNA, 120 bp, synthetic construct
  source 1..120: mol_type = other DNA
aaaaaaaaaaatatacaaaatataaatttaaaaaacaaaaaaaataactccaaatatcttaaaatatttttcttaatacaaaacatataaatcctaattaccttcaaacaactatcaccc

SEQ ID NO: 3500 - DNA, 120 bp, synthetic construct
  source 1..120: mol_type = other DNA
aaaaaagaaaatgtataagatataaatttaaaaaatagaaaaggtagttttagatattttaaaatattttttttaatatagaatatatagattttaattgtttttaaatagttattgttt

SEQ ID NO: 3501 - DNA, 120 bp, synthetic construct
  source 1..120: mol_type = other DNA
aaaaaaaaaaatatacaaaatataaatttaaaaaacaaaaaaaataactccaaatatctaacaatatttttcttaatacaaaacatataaatcctaattaccttcaaacaactatcgccc

SEQ ID NO: 3502 - DNA, 120 bp, synthetic construct
  source 1..120: mol_type = other DNA
aaaaaagaaaatgtataagatataaatttaaaaaatagaaaaggtagttttagatatttgataatattttttttaatatagaatatatagattttaattgtttttaaatagttatcgttt

SEQ ID NO: 3503 - DNA, 120 bp, synthetic construct
  source 1..120: mol_type = other DNA
aaaaaaaaaaatatacaaaatataaatttaaaaaacaaaaaaaataactccaaatatcttaaaatatttttcttaatacaaaacatataaatcctaattaccttcaaacaactatcgccc

SEQ ID NO: 3504 - DNA, 120 bp, synthetic construct
  source 1..120: mol_type = other DNA
aaaaaagaaaatgtataagatataaatttaaaaaatagaaaaggtagttttagatattttaaaatattttttttaatatagaatatatagattttaattgtttttaaatagttatcgttt

SEQ ID NO: 3505 - DNA, 120 bp, synthetic construct
  source 1..120: mol_type = other DNA
aaattaaaaaaatataaacaatctttattttacacaacaccacattcattaaaacccatacaaattaaaaaaaataatatactccctttctaattaacaaatcttaacataaacaaaatt

SEQ ID NO: 3506 - DNA, 120 bp, synthetic construct
  source 1..120: mol_type = other DNA
aaattgggaggatataagtaatttttgttttgtatagtattatatttattgaaatttatgtagattggaaggaatgatgtattttttttttagttgataaattttagtatgaataaagtt

SEQ ID NO: 3507 - DNA, 120 bp, synthetic construct
  source 1..120: mol_type = other DNA
aaattaaaaaaatataaacaatctttattttacacaacaccacattcattaaaacccataacaattaaaaaaaataatatactccctttctaattaacaaatcttaacataaacaaaatt

SEQ ID NO: 3508 - DNA, 120 bp, synthetic construct
  source 1..120: mol_type = other DNA
aaattgggaggatataagtaatttttgttttgtatagtattatatttattgaaatttatgatgattggaaggaatgatgtattttttttttagttgataaattttagtatgaataaagtt

SEQ ID NO: 3509 - DNA, 120 bp, synthetic construct; identical to SEQ ID NO: 3505
  source 1..120: mol_type = other DNA

SEQ ID NO: 3510 - DNA, 120 bp, synthetic construct; identical to SEQ ID NO: 3506
  source 1..120: mol_type = other DNA

SEQ ID NO: 3511 - DNA, 120 bp, synthetic construct
  source 1..120: mol_type = other DNA
aaattaaaaaaatataaacaatctttattttacacaacaccacattcattaaaacccataacgattaaaaaaaataatatactccctttctaattaacaaatcttaacataaacaaaatt

SEQ ID NO: 3512 - DNA, 120 bp, synthetic construct
  source 1..120: mol_type = other DNA
aaattgggaggatataagtaatttttgttttgtatagtattatatttattgaaatttatgacgattggaaggaatgatgtattttttttttagttgataaattttagtatgaataaagtt

SEQ ID NO: 3513 - DNA, 120 bp, synthetic construct
  source 1..120: mol_type = other DNA
atttataataataaaaaataaaaaaactataatatacttctacataaaataatatacaactatttaaataaaaaaactaaaattccatatatccatactcaaaaacacaatactaaaaaa

SEQ ID NO: 3514 - DNA, 120 bp, synthetic construct
  source 1..120: mol_type = other DNA
gtttataatagtgaaaaatgggaggattgtggtatgtttttgtgtggaatagtatatagttatttaaatgaaggaattaaagttttatgtatttatgtttaagaatataatgttgaggag

SEQ ID NO: 3515 - DNA, 120 bp, synthetic construct
  source 1..120: mol_type = other DNA
atttataataataaaaaataaaaaaactataatatacttctacataaaataatatacaacactttaaataaaaaaactaaaattccatatatccatactcaaaaacacaatactaaaaaa

SEQ ID NO: 3516 - DNA, 120 bp, synthetic construct
  source 1..120: mol_type = other DNA
gtttataatagtgaaaaatgggaggattgtggtatgtttttgtgtggaatagtatatagtattttaaatgaaggaattaaagttttatgtatttatgtttaagaatataatgttgaggag

SEQ ID NO: 3517 - DNA, 120 bp, synthetic construct
  source 1..120: mol_type = other DNA
atttataataataaaaaataaaaaaactataatatacttctacgtaaaataatatacaactatttaaataaaaaaactaaaattccatatatccatactcaaaaacacaatactaaaaaa

SEQ ID NO: 3518 - DNA, 120 bp, synthetic construct
  source 1..120: mol_type = other DNA
gtttataatagtgaaaaatgggaggattgtggtatgtttttgcgtggaatagtatatagttatttaaatgaaggaattaaagttttatgtatttatgtttaagaatataatgttgaggag

SEQ ID NO: 3519 - DNA, 120 bp, synthetic construct
  source 1..120: mol_type = other DNA
atttataataataaaaaataaaaaaactataatatacttctacgtaaaataatatacaacactttaaataaaaaaactaaaattccatatatccatactcaaaaacacaatactaaaaaa

SEQ ID NO: 3520 - DNA, 120 bp, synthetic construct
  source 1..120: mol_type = other DNA
gtttataatagtgaaaaatgggaggattgtggtatgtttttgcgtggaatagtatatagtattttaaatgaaggaattaaagttttatgtatttatgtttaagaatataatgttgaggag

SEQ ID NO: 3521 - DNA, 120 bp, synthetic construct
  source 1..120: mol_type = other DNA
caaaaacacaatcacccacacatctcccaaaacacaaaccccaaaaaactctaacattccattacaaacccttacacatctacaccccactacaccccactaaaaacctccactcacaac

SEQ ID NO: 3522 - DNA, 120 bp, synthetic construct
  source 1..120: mol_type = other DNA
tgggagtgtggttatttgtatgttttttagggtgtgggttttggaggattttggtgttttgttgtaggtttttatatatttgtattttattgtgttttgttggaaatttttatttatagt

SEQ ID NO: 3523 - DNA, 120 bp, synthetic construct
  source 1..120: mol_type = other DNA
caaaaacacaatcacccacacatctcccaaaacacaaaccccaaaaaactctaacattcctatacaaacccttacacatctacaccccactacaccccactaaaaacctccactcacaac

SEQ ID NO: 3524 - DNA, 120 bp, synthetic construct
  source 1..120: mol_type = other DNA
tgggagtgtggttatttgtatgttttttagggtgtgggttttggaggattttggtgtttttgtgtaggtttttatatatttgtattttattgtgttttgttggaaatttttatttatagt

SEQ ID NO: 3525 - DNA, 120 bp, synthetic construct
  source 1..120: mol_type = other DNA
cgaaaacgcgatcacccgcacgtctcccaaaacgcgaaccccgaaaaactctaacgttccgttacaaacccttacacatctacaccccactacgccccgctaaaaacctccactcacaac

SEQ ID NO: 3526 - DNA, 120 bp, synthetic construct
  source 1..120: mol_type = other DNA
cgggagcgcggttattcgtacgttttttagggcgcgggtttcggaggattttggcgtttcgttgtaggtttttatatatttgtattttattgcgtttcgttggaaatttttatttatagt

SEQ ID NO: 3527 - DNA, 120 bp, synthetic construct
  source 1..120: mol_type = other DNA
cgaaaacgcgatcacccgcacgtctcccaaaacgcgaaccccgaaaaactctaacgttcctatacaaacccttacacatctacaccccactacgccccgctaaaaacctccactcacaac

SEQ ID NO: 3528 - DNA, 120 bp, synthetic construct
  source 1..120: mol_type = other DNA
cgggagcgcggttattcgtacgttttttagggcgcgggtttcggaggattttggcgtttttgtgtaggtttttatatatttgtattttattgcgtttcgttggaaatttttatttatagt

SEQ ID NO: 3529 - DNA, 120 bp, synthetic construct
  source 1..120: mol_type = other DNA
acaaacaaaaccaaaccaacaaaataaccaataaatctttatcataaaatttattcaacattaaattataccacttcttataaactcaattaataaaaacttactacatctacaaattac

SEQ ID NO: 3530 - DNA, 120 bp, synthetic construct
  source 1..120: mol_type = other DNA
ataaataaaattaaattagtaaaataattaataagtttttattatgagatttatttaatattaagttatgttattttttataagtttaattaataagaatttattatatttataaattat

SEQ ID NO: 3531 - DNA, 120 bp, synthetic construct
  source 1..120: mol_type = other DNA
acaaacaaaaccaaaccaacaaaataaccaataaatctttatcataaaatttattcaacaaaaaattataccacttcttataaactcaattaataaaaacttactacatctacaaattac

SEQ ID NO: 3532 - DNA, 120 bp, synthetic construct
  source 1..120: mol_type = other DNA
ataaataaaattaaattagtaaaataattaataagtttttattatgagatttatttaataagaagttatgttattttttataagtttaattaataagaatttattatatttataaattat

SEQ ID NO: 3533 - DNA, 120 bp, synthetic construct; identical to SEQ ID NO: 3529
  source 1..120: mol_type = other DNA

SEQ ID NO: 3534 - DNA, 120 bp, synthetic construct; identical to SEQ ID NO: 3530
  source 1..120: mol_type = other DNA

SEQ ID NO: 3535 - DNA, 120 bp, synthetic construct; identical to SEQ ID NO: 3531
  source 1..120: mol_type = other DNA

SEQ ID NO: 3536 - DNA, 120 bp, synthetic construct; identical to SEQ ID NO: 3532
  source 1..120: mol_type = other DNA

SEQ ID NO: 3537 - DNA, 120 bp, synthetic construct
  source 1..120: mol_type = other DNA
tcactacttcaaaaaacattttaaaataaatcttcacaaactccaaaaataaaacaaaaaaattattttcactatcaataataactacaaaataaatttatactttcttttcttatttat

SEQ ID NO: 3538 - DNA, 120 bp, synthetic construct
  source 1..120: mol_type = other DNA
ttattgttttaagagatattttaaaatggatttttatagattttagggatggagtaagaggattgtttttattgttagtagtaattataaaatgagtttgtattttttttttttgtttat

SEQ ID NO: 3539 - DNA, 120 bp, synthetic construct
  source 1..120: mol_type = other DNA
tcactacttcaaaaaacattttaaaataaatcttcacaaactccaaaaataaaacaaaaattttattttcactatcaataataactacaaaataaatttatactttcttttcttatttat

SEQ ID NO: 3540 - DNA, 120 bp, synthetic construct
  source 1..120: mol_type = other DNA
ttattgttttaagagatattttaaaatggatttttatagattttagggatggagtaagagttttgtttttattgttagtagtaattataaaatgagtttgtattttttttttttgtttat

SEQ ID NO: 3541 - DNA, 120 bp, synthetic construct; identical to SEQ ID NO: 3537
  source 1..120: mol_type = other DNA

SEQ ID NO: 3542 - DNA, 120 bp, synthetic construct; identical to SEQ ID NO: 3538
  source 1..120: mol_type = other DNA

SEQ ID NO: 3543 - DNA, 120 bp, synthetic construct; identical to SEQ ID NO: 3539
  source 1..120: mol_type = other DNA

SEQ ID NO: 3544 - DNA, 120 bp, synthetic construct; identical to SEQ ID NO: 3540
  source 1..120: mol_type = other DNA

SEQ ID NO: 3545 - DNA, 120 bp, synthetic construct
  source 1..120: mol_type = other DNA
aaaaaaatttaaaaatcttttttaaaaacttaaaatttaacacttatctaccatatattaaaatcacaaaattactcaatttatcttaaaaataatttatataaaactcaaaattttata

SEQ ID NO: 3546 - DNA, 120 bp, synthetic construct
  source 1..120: mol_type = other DNA
aagaaaatttaaaaattttttttgaaaatttggaatttagtatttgtttgttatatattagggttatagaattgtttaatttgttttaagagtaatttgtgtagaatttaaaattttgtg

SEQ ID NO: 3547 - DNA, 120 bp, synthetic construct
  source 1..120: mol_type = other DNA
aaaaaaatttaaaaatcttttttaaaaacttaaaatttaacacttatctaccatatattattatcacaaaattactcaatttatcttaaaaataatttatataaaactcaaaattttata

SEQ ID NO: 3548 - DNA, 120 bp, synthetic construct
  source 1..120: mol_type = other DNA
aagaaaatttaaaaattttttttgaaaatttggaatttagtatttgtttgttatatattattgttatagaattgtttaatttgttttaagagtaatttgtgtagaatttaaaattttgtg

SEQ ID NO: 3549 - DNA, 120 bp, synthetic construct; identical to SEQ ID NO: 3545
  source 1..120: mol_type = other DNA

SEQ ID NO: 3550 - DNA, 120 bp, synthetic construct; identical to SEQ ID NO: 3546
  source 1..120: mol_type = other DNA

SEQ ID NO: 3551 - DNA, 120 bp, synthetic construct; identical to SEQ ID NO: 3547
  source 1..120: mol_type = other DNA

SEQ ID NO: 3552 - DNA, 120 bp, synthetic construct; identical to SEQ ID NO: 3548
  source 1..120: mol_type = other DNA

SEQ ID NO: 3553 - DNA, 120 bp, synthetic construct
  source 1..120: mol_type = other DNA
ctactaattatctaaaacattcattctttcttcctcctaattaaataaatttatctaaaaacataatcccccatctactctctacatttccttaataatactactaataaaattaaaacc

SEQ ID NO: 3554 - DNA, 120 bp, synthetic construct
  source 1..120: mol_type = other DNA
ttattagttatttagaatatttatttttttttttttttagttagatggatttgtttgaggatgtgattttttatttattttttatatttttttaatgatgttattagtaaaattaaagtt

SEQ ID NO: 3555 - DNA, 120 bp, synthetic construct
  source 1..120: mol_type = other DNA
ctactaattatctaaaacattcattctttcttcctcctaattaaataaatttatctaaaataataatcccccatctactctctacatttccttaataatactactaataaaattaaaacc

SEQ ID NO: 3556 - DNA, 120 bp, synthetic construct
  source 1..120: mol_type = other DNA
ttattagttatttagaatatttatttttttttttttttagttagatggatttgtttgaggtagtgattttttatttattttttatatttttttaatgatgttattagtaaaattaaagtt

SEQ ID NO: 3557 - DNA, 120 bp, synthetic construct
  source 1..120: mol_type = other DNA
ctactaattatctaaaacattcattctttcttcctcctaattaaataaatttatctaaaaacgtaatcccccatctactctctacatttccttaataatactactaataaaattaaaacc

SEQ ID NO: 3558 - DNA, 120 bp, synthetic construct
  source 1..120: mol_type = other DNA
ttattagttatttagaatatttatttttttttttttttagttagatggatttgtttgaggacgtgattttttatttattttttatatttttttaatgatgttattagtaaaattaaagtt

SEQ ID NO: 3559 - DNA, 120 bp, synthetic construct; identical to SEQ ID NO: 3555
  source 1..120: mol_type = other DNA

SEQ ID NO: 3560 - DNA, 120 bp, synthetic construct; identical to SEQ ID NO: 3556
  source 1..120: mol_type = other DNA

SEQ ID NO: 3561 - DNA, 120 bp, synthetic construct
  source 1..120: mol_type = other DNA
aaattcaataattataaaacaatatcttcaaacattataaaactctttaaaaaatataacattccaaaacattctaaaaaaaaaaataatattcaataataaaaccctaaaaacaaaaat

SEQ ID NO: 3562 - DNA, 120 bp, synthetic construct
  source 1..120: mol_type = other DNA
gagtttagtaattgtgagatggtatttttaggtattgtggaattttttgggggatgtgatattttagggtattttggagaaaggaataatgtttagtaataaaattttggagataggaat

SEQ ID NO: 3563 - DNA, 120 bp, synthetic construct
  source 1..120: mol_type = other DNA
aaattcaataattataaaacaatatcttcaaacattataaaactctttaaaaaatataactatccaaaacattctaaaaaaaaaaataatattcaataataaaaccctaaaaacaaaaat

SEQ ID NO: 3564 - DNA, 120 bp, synthetic construct
  source 1..120: mol_type = other DNA
gagtttagtaattgtgagatggtatttttaggtattgtggaattttttgggggatgtgattatttagggtattttggagaaaggaataatgtttagtaataaaattttggagataggaat

SEQ ID NO: 3565 - DNA, 120 bp, synthetic construct
  source 1..120: mol_type = other DNA
aaattcaataattataaaacgatatcttcaaacattataaaactctttaaaaaatataacattccaaaacattctaaaaaaaaaaataatattcaataataaaaccctaaaaacaaaaat

SEQ ID NO: 3566 - DNA, 120 bp, synthetic construct
  source 1..120: mol_type = other DNA
gagtttagtaattgtgagacggtatttttaggtattgtggaattttttgggggatgtgatattttagggtattttggagaaaggaataatgtttagtaataaaattttggagataggaat

SEQ ID NO: 3567 - DNA, 120 bp, synthetic construct
  source 1..120: mol_type = other DNA
aaattcaataattataaaacgatatcttcaaacattataaaactctttaaaaaatataactatccaaaacattctaaaaaaaaaaataatattcaataataaaaccctaaaaacaaaaat

SEQ ID NO: 3568 - DNA, 120 bp, synthetic construct
  source 1..120: mol_type = other DNA
gagtttagtaattgtgagacggtatttttaggtattgtggaattttttgggggatgtgattatttagggtattttggagaaaggaataatgtttagtaataaaattttggagataggaat

SEQ ID NO: 3569 - DNA, 120 bp, synthetic construct
  source 1..120: mol_type = other DNA
taaaccaccacacttaaccaaacaaaatataaaaatttttaaaaaaaaaccactaaccataccctaaaaaacaatatcatcaaaaacactccttcaaactctccaccccaataatataaa

SEQ ID NO: 3570 - DNA, 120 bp, synthetic construct
  source 1..120: mol_type = other DNA
tgagttattatatttggttgaatagagtataaggatttttagaggaaaattattggttatgttttgaggaatagtgttattaaagatatttttttaaattttttattttaatggtgtagg

SEQ ID NO: 3571 - DNA, 120 bp, synthetic construct
  source 1..120: mol_type = other DNA
taaaccaccacacttaaccaaacaaaatataaaaatttttaaaaaaaaaccactaaccattacctaaaaaacaatatcatcaaaaacactccttcaaactctccaccccaataatataaa

SEQ ID NO: 3572 - DNA, 120 bp, synthetic construct
  source 1..120: mol_type = other DNA
tgagttattatatttggttgaatagagtataaggatttttagaggaaaattattggttattatttgaggaatagtgttattaaagatatttttttaaattttttattttaatggtgtagg

SEQ ID NO: 3573 - DNA, 120 bp, synthetic construct
  source 1..120: mol_type = other DNA
taaaccaccacacttaaccgaacaaaatataaaaatttttaaaaaaaaaccactaaccataccctaaaaaacaatatcatcaaaaacactccttcaaactctccaccccaataatataaa

SEQ ID NO: 3574 - DNA, 120 bp, synthetic construct
  source 1..120: mol_type = other DNA
tgagttattatatttggtcgaatagagtataaggatttttagaggaaaattattggttatgttttgaggaatagtgttattaaagatatttttttaaattttttattttaatggtgtagg

SEQ ID NO: 3575 - DNA, 120 bp, synthetic construct
  source 1..120: mol_type = other DNA
taaaccaccacacttaaccgaacaaaatataaaaatttttaaaaaaaaaccactaaccattacctaaaaaacaatatcatcaaaaacactccttcaaactctccaccccaataatataaa

SEQ ID NO: 3576 - DNA, 120 bp, synthetic construct
  source 1..120: mol_type = other DNA
tgagttattatatttggtcgaatagagtataaggatttttagaggaaaattattggttattatttgaggaatagtgttattaaagatatttttttaaattttttattttaatggtgtagg

SEQ ID NO: 3577 - DNA, 120 bp, synthetic construct
  source 1..120: mol_type = other DNA
tttcattaaaaacactaaaaaataaaattcaatataattcaaaactattttaaacttctaaataaaattacacttacaataaaaactaactaaaatctaactatcaaaatttaaatacat

SEQ ID NO: 3578 - DNA, 120 bp, synthetic construct
  source 1..120: mol_type = other DNA
ttttattgggaatattggagagtggaatttagtgtaatttaaggttattttgaatttttgaatagaattatatttataataaaaattagttaaaatttaattattaggatttagatatat

SEQ ID NO: 3579 - DNA, 120 bp, synthetic construct
  source 1..120: mol_type = other DNA
tttcattaaaaacactaaaaaataaaattcaatataattcaaaactattttaaacttctacctaaaattacacttacaataaaaactaactaaaatctaactatcaaaatttaaatacat

SEQ ID NO: 3580 - DNA, 120 bp, synthetic construct
  source 1..120: mol_type = other DNA
ttttattgggaatattggagagtggaatttagtgtaatttaaggttattttgaatttttgtttagaattatatttataataaaaattagttaaaatttaattattaggatttagatatat

SEQ ID NO: 3581 - DNA, 120 bp, synthetic construct; identical to SEQ ID NO: 3577
  source 1..120: mol_type = other DNA

SEQ ID NO: 3582 - DNA, 120 bp, synthetic construct; identical to SEQ ID NO: 3578
  source 1..120: mol_type = other DNA

SEQ ID NO: 3583 - DNA, 120 bp, synthetic construct; identical to SEQ ID NO: 3579
  source 1..120: mol_type = other DNA

SEQ ID NO: 3584 - DNA, 120 bp, synthetic construct; identical to SEQ ID NO: 3580
  source 1..120: mol_type = other DNA

SEQ ID NO: 3585 - DNA, 120 bp, synthetic construct
  source 1..120: mol_type = other DNA
aactacaaatatttaattttaaactattattataatactttaaaaatcttaaaacaataatcatttaacacaataacacaaaaataaaaacaaacaaattaaaatcataacttaaataaa

SEQ ID NO: 3586 - DNA, 120 bp, synthetic construct
  source 1..120: mol_type = other DNA
aattataaatatttaattttgaattattattataatattttggaaattttaaagtagtggttgtttggtatagtaatatggagatggaggtagataggttaaaattatgatttgggtaaa

SEQ ID NO: 3587 - DNA, 120 bp, synthetic construct
  source 1..120: mol_type = other DNA
aactacaaatatttaattttaaactattattataatactttaaaaatcttaaaacaataaaaatttaacacaataacacaaaaataaaaacaaacaaattaaaatcataacttaaataaa

SEQ ID NO: 3588 - DNA, 120 bp, synthetic construct
  source 1..120: mol_type = other DNA
aattataaatatttaattttgaattattattataatattttggaaattttaaagtagtggaagtttggtatagtaatatggagatggaggtagataggttaaaattatgatttgggtaaa

SEQ ID NO: 3589 - DNA, 120 bp, synthetic construct
  source 1..120: mol_type = other DNA
aactacaaatatttaattttaaactattattataatactttaaaaatcttaaaacaataatcgtttaacacaataacacgaaaataaaaacaaacaaattaaaatcataacttaaataaa

SEQ ID NO: 3590 - DNA, 120 bp, synthetic construct
  source 1..120: mol_type = other DNA
aattataaatatttaattttgaattattattataatattttggaaattttaaagtagtggtcgtttggtatagtaatacggagatggaggtagataggttaaaattatgatttgggtaaa

SEQ ID NO: 3591 - DNA, 120 bp, synthetic construct
  source 1..120: mol_type = other DNA
aactacaaatatttaattttaaactattattataatactttaaaaatcttaaaacaataaaaatttaacacaataacacgaaaataaaaacaaacaaattaaaatcataacttaaataaa

SEQ ID NO: 3592 - DNA, 120 bp, synthetic construct
  source 1..120: mol_type = other DNA
aattataaatatttaattttgaattattattataatattttggaaattttaaagtagtggaagtttggtatagtaatacggagatggaggtagataggttaaaattatgatttgggtaaa

SEQ ID NO: 3593 - DNA, 120 bp, synthetic construct
  source 1..120: mol_type = other DNA
tacatttcttccttaaaactaaaacaaaaaattaaatataaatactccaaatttacataaaactaaaattaaatctcttcattacaaaccaatttaaaaaattataaaaaaaaatctttc

SEQ ID NO: 3594 - DNA, 120 bp, synthetic construct
  source 1..120: mol_type = other DNA
tgtattttttttttggggttggaataaagaattagatgtaagtgttttagatttgtataaggttaggattgagtttttttattataaattaatttggggaattataaaagaaaatttttt

SEQ ID NO: 3595 - DNA, 120 bp, synthetic construct
  source 1..120: mol_type = other DNA
tacatttcttccttaaaactaaaacaaaaaattaaatataaatactccaaatttacataattctaaaattaaatctcttcattacaaaccaatttaaaaaattataaaaaaaaatctttc

SEQ ID NO: 3596 - DNA, 120 bp, synthetic construct
  source 1..120: mol_type = other DNA
tgtattttttttttggggttggaataaagaattagatgtaagtgttttagatttgtataattttaggattgagtttttttattataaattaatttggggaattataaaagaaaatttttt

SEQ ID NO: 3597 - DNA, 120 bp, synthetic construct; identical to SEQ ID NO: 3593
  source 1..120: mol_type = other DNA

SEQ ID NO: 3598 - DNA, 120 bp, synthetic construct; identical to SEQ ID NO: 3594
  source 1..120: mol_type = other DNA

SEQ ID NO: 3599 - DNA, 120 bp, synthetic construct; identical to SEQ ID NO: 3595
  source 1..120: mol_type = other DNA

SEQ ID NO: 3600 - DNA, 120 bp, synthetic construct; identical to SEQ ID NO: 3596
  source 1..120: mol_type = other DNA

SEQ ID NO: 3601 - DNA, 120 bp, synthetic construct
  source 1..120: mol_type = other DNA
caaatcttacaataaaaaataattcaactaaaattcaaattaaaacaaataatactacctccaaaatccacactcttaaaaatactataccctaccaaaaaataaattctaaaaattaaa

SEQ ID NO: 3602 - DNA, 120 bp, synthetic construct
  source 1..120: mol_type = other DNA
taaattttatagtaggaaatggtttagttgagatttaaattgaggtaggtgatgttgtttttagagtttatatttttaaagatattgtgttttattgaaaaataagttttaaaggttgag

SEQ ID NO: 3603 - DNA, 120 bp, synthetic construct
  source 1..120: mol_type = other DNA
caaatcttacaataaaaaataattcaactaaaattcaaattaaaacaaataatactacctaaaaaatccacactcttaaaaatactataccctaccaaaaaataaattctaaaaattaaa

SEQ ID NO: 3604 - DNA, 120 bp, synthetic construct
  source 1..120: mol_type = other DNA
taaattttatagtaggaaatggtttagttgagatttaaattgaggtaggtgatgttgtttaaagagtttatatttttaaagatattgtgttttattgaaaaataagttttaaaggttgag

SEQ ID NO: 3605 - DNA, 120 bp, synthetic construct
  source 1..120: mol_type = other DNA
caaatcttacaataaaaaataattcaactaaaattcaaattaaaacaaataatactacctccaaaatccacactcttaaaaatactataccctaccgaaaaataaattctaaaaattaaa

SEQ ID NO: 3606 - DNA, 120 bp, synthetic construct
  source 1..120: mol_type = other DNA
taaattttatagtaggaaatggtttagttgagatttaaattgaggtaggtgatgttgtttttagagtttatatttttaaagatattgtgttttatcgaaaaataagttttaaaggttgag

SEQ ID NO: 3607 - DNA, 120 bp, synthetic construct
  source 1..120: mol_type = other DNA
caaatcttacaataaaaaataattcaactaaaattcaaattaaaacaaataatactacctaaaaaatccacactcttaaaaatactataccctaccgaaaaataaattctaaaaattaaa

SEQ ID NO: 3608 - DNA, 120 bp, synthetic construct
  source 1..120: mol_type = other DNA
taaattttatagtaggaaatggtttagttgagatttaaattgaggtaggtgatgttgtttaaagagtttatatttttaaagatattgtgttttatcgaaaaataagttttaaaggttgag

SEQ ID NO: 3609 - DNA, 120 bp, synthetic construct
  source 1..120: mol_type = other DNA
aaaaatatattacctactataaataactaataatttttaaaaatattcaataaccaaattaacaaaacactattattataaatttatccttttacctctcattttattctaaaaaattaa

SEQ ID NO: 3610 - DNA, 120 bp, synthetic construct
  source 1..120: mol_type = other DNA
ggaggtgtgttgtttgttgtaaatggttaatagtttttaaaagtgtttagtaattagattaataaagtattgttattatgagtttgtttttttgttttttattttattttaggggattgg

SEQ ID NO: 3611 - DNA, 120 bp, synthetic construct
  source 1..120: mol_type = other DNA
aaaaatatattacctactataaataactaataatttttaaaaatattcaataaccaaattttcaaaacactattattataaatttatccttttacctctcattttattctaaaaaattaa

SEQ ID NO: 3612 - DNA, 120 bp, synthetic construct
  source 1..120: mol_type = other DNA
ggaggtgtgttgtttgttgtaaatggttaatagtttttaaaagtgtttagtaattagatttttaaagtattgttattatgagtttgtttttttgttttttattttattttaggggattgg

SEQ ID NO: 3613 - DNA, 120 bp, synthetic construct; identical to SEQ ID NO: 3609
  source 1..120: mol_type = other DNA

SEQ ID NO: 3614 - DNA, 120 bp, synthetic construct; identical to SEQ ID NO: 3610
  source 1..120: mol_type = other DNA

SEQ ID NO: 3615 - DNA, 120 bp, synthetic construct; identical to SEQ ID NO: 3611
  source 1..120: mol_type = other DNA

SEQ ID NO: 3616 - DNA, 120 bp, synthetic construct; identical to SEQ ID NO: 3612
  source 1..120: mol_type = other DNA

SEQ ID NO: 3617 - DNA, 120 bp, synthetic construct
  source 1..120: mol_type = other DNA
attcccttaaaaaccacaaaaaaacaaacacaacccacataaaataataaacctaattctataccacctaaactaaaaatcaactaaaaacttaaatatacaataaaactctcacaacca

SEQ ID NO: 3618 - DNA, 120 bp, synthetic construct
  source 1..120: mol_type = other DNA
gtttttttaagagttataggaggataaatataatttatatgagatgataagtttgattttgtgttatttggattggaaattgattaagagtttgagtgtataataagatttttataatta

SEQ ID NO: 3619 - DNA, 120 bp, synthetic construct
  source 1..120: mol_type = other DNA
attcccttaaaaaccacaaaaaaacaaacacaacccacataaaataataaacctaattcttaaccacctaaactaaaaatcaactaaaaacttaaatatacaataaaactctcacaacca

SEQ ID NO: 3620 - DNA, 120 bp, synthetic construct
  source 1..120: mol_type = other DNA
gtttttttaagagttataggaggataaatataatttatatgagatgataagtttgatttttagttatttggattggaaattgattaagagtttgagtgtataataagatttttataatta

SEQ ID NO: 3621 - DNA, 120 bp, synthetic construct
  source 1..120: mol_type = other DNA
attcccttaaaaaccacaaaaaaacaaacacaacccacataaaataataaacctaattctataccacctaaactaaaaatcgactaaaaacttaaatatacaataaaactctcacaacca

SEQ ID NO: 3622 - DNA, 120 bp, synthetic construct
  source 1..120: mol_type = other DNA
gtttttttaagagttataggaggataaatataatttatatgagatgataagtttgattttgtgttatttggattggaaatcgattaagagtttgagtgtataataagatttttataatta

SEQ ID NO: 3623 - DNA, 120 bp, synthetic construct
  source 1..120: mol_type = other DNA
attcccttaaaaaccacaaaaaaacaaacacaacccacataaaataataaacctaattcttaaccacctaaactaaaaatcgactaaaaacttaaatatacaataaaactctcacaacca

SEQ ID NO: 3624 - DNA, 120 bp, synthetic construct
  source 1..120: mol_type = other DNA
gtttttttaagagttataggaggataaatataatttatatgagatgataagtttgatttttagttatttggattggaaatcgattaagagtttgagtgtataataagatttttataatta

SEQ ID NO: 3625 - DNA, 120 bp, synthetic construct
  source 1..120: mol_type = other DNA
tatcacataaacctactcttacaaacatttactcattcaactactatattaacaaaaactatttacaatacatctatttttctaatatataaaataataattttataacttaacataata

SEQ ID NO: 3626 - DNA, 120 bp, synthetic construct
  source 1..120: mol_type = other DNA
tgttatataagtttatttttatagatatttatttatttaattattgtgttagtagagattatttataatgtatttatttttttgatgtgtaagataatggttttatggtttgatgtagtg

SEQ ID NO: 3627 - DNA, 120 bp, synthetic construct
  source 1..120: mol_type = other DNA
tatcacataaacctactcttacaaacatttactcattcaactactatattaacaaaaacttattacaatacatctatttttctaatatataaaataataattttataacttaacataata

SEQ ID NO: 3628 - DNA, 120 bp, synthetic construct
  source 1..120: mol_type = other DNA
tgttatataagtttatttttatagatatttatttatttaattattgtgttagtagagatttattataatgtatttatttttttgatgtgtaagataatggttttatggtttgatgtagtg

SEQ ID NO: 3629 - DNA, 120 bp, synthetic construct
  source 1..120: mol_type = other DNA
tatcacataaacctactcttacaaacatttactcattcaactactatattaacaaaaactatttacaatacatctatttttctaatatataaaataataattttataacttaacgtaata

SEQ ID NO: 3630 - DNA, 120 bp, synthetic construct
  source 1..120: mol_type = other DNA
tgttatataagtttatttttatagatatttatttatttaattattgtgttagtagagattatttataatgtatttatttttttgatgtgtaagataatggttttatggtttgacgtagtg

SEQ ID NO: 3631 - DNA, 120 bp, synthetic construct
  source 1..120: mol_type = other DNA
tatcacataaacctactcttacaaacatttactcattcaactactatattaacaaaaacttattacaatacatctatttttctaatatataaaataataattttataacttaacgtaata

SEQ ID NO: 3632 - DNA, 120 bp, synthetic construct
  source 1..120: mol_type = other DNA
tgttatataagtttatttttatagatatttatttatttaattattgtgttagtagagatttattataatgtatttatttttttgatgtgtaagataatggttttatggtttgacgtagtg

SEQ ID NO: 3633 - DNA, 120 bp, synthetic construct
  source 1..120: mol_type = other DNA
aattcttccaaaacaatcacaataacttattaatatcatccaaatcctccattctttaaaaaaccattttaaatatattaacttttattccttaaacttatacctcattatactaaaaaa

SEQ ID NO: 3634 - DNA, 120 bp, synthetic construct
  source 1..120: mol_type = other DNA
gatttttttaaggtagttatagtggtttgttgatgttatttaggttttttattttttggaggattattttaagtatgttggtttttgttttttagatttgtattttattatgttaagaga

SEQ ID NO: 3635 - DNA, 120 bp, synthetic construct
  source 1..120: mol_type = other DNA
aattcttccaaaacaatcacaataacttattaatatcatccaaatcctccattctttaaactaccattttaaatatattaacttttattccttaaacttatacctcattatactaaaaaa

SEQ ID NO: 3636 - DNA, 120 bp, synthetic construct
  source 1..120: mol_type = other DNA
gatttttttaaggtagttatagtggtttgttgatgttatttaggttttttattttttggattattattttaagtatgttggtttttgttttttagatttgtattttattatgttaagaga

SEQ ID NO: 3637 - DNA, 120 bp, synthetic construct; identical to SEQ ID NO: 3633
  source 1..120: mol_type = other DNA

SEQ ID NO: 3638 - DNA, 120 bp, synthetic construct; identical to SEQ ID NO: 3634
  source 1..120: mol_type = other DNA

SEQ ID NO: 3639 - DNA, 120 bp, synthetic construct; identical to SEQ ID NO: 3635
  source 1..120: mol_type = other DNA

SEQ ID NO: 3640 - DNA, 120 bp, synthetic construct; identical to SEQ ID NO: 3636
  source 1..120: mol_type = other DNA

SEQ ID NO: 3641 - DNA, 120 bp, synthetic construct
  source 1..120: mol_type = other DNA
cccatctactaactcacctaatcaataataaataaaaaccaaacctacaacaatcctctattaccaaaaaattaaataaaacataataaaataaattaaattataaaacatctatattta

SEQ ID NO: 3642 - DNA, 120 bp, synthetic construct
  source 1..120: mol_type = other DNA
tttgtttgttggtttatttggttagtggtgggtagggattaggtttgtaatagttttttgttgttagggagttgagtgggatgtggtgaaatgagttgagttataggatatttatattta

SEQ ID NO: 3643 - DNA, 120 bp, synthetic construct
  source 1..120: mol_type = other DNA
cccatctactaactcacctaatcaataataaataaaaaccaaacctacaacaatcctctaaaaccaaaaaattaaataaaacataataaaataaattaaattataaaacatctatattta

SEQ ID NO: 3644 - DNA, 120 bp, synthetic construct
  source 1..120: mol_type = other DNA
tttgtttgttggtttatttggttagtggtgggtagggattaggtttgtaatagttttttggagttagggagttgagtgggatgtggtgaaatgagttgagttataggatatttatattta

SEQ ID NO: 3645 - DNA, 120 bp, synthetic construct
  source 1..120: mol_type = other DNA
cccgtctactaactcacctaatcaataataaataaaaaccaaacctacaacaatcctctattaccaaaaaattaaataaaacgtaataaaataaattaaattataaaacatctatattta

SEQ ID NO: 3646 - DNA, 120 bp, synthetic construct
  source 1..120: mol_type = other DNA
ttcgtttgttggtttatttggttagtggtgggtagggattaggtttgtaatagttttttgttgttagggagttgagtgggacgtggtgaaatgagttgagttataggatatttatattta

SEQ ID NO: 3647 - DNA, 120 bp, synthetic construct
  source 1..120: mol_type = other DNA
cccgtctactaactcacctaatcaataataaataaaaaccaaacctacaacaatcctctaaaaccaaaaaattaaataaaacgtaataaaataaattaaattataaaacatctatattta

SEQ ID NO: 3648 - DNA, 120 bp, synthetic construct
  source 1..120: mol_type = other DNA
ttcgtttgttggtttatttggttagtggtgggtagggattaggtttgtaatagttttttggagttagggagttgagtgggacgtggtgaaatgagttgagttataggatatttatattta

SEQ ID NO: 3649 - DNA, 120 bp, synthetic construct
  source 1..120: mol_type = other DNA
tattcccaaacaactactttaaaaacctctcctaatttatttattttttttttcatacccactttatttaacacatactaaatttttcccaactaactatcaaacattactcacatttaa

SEQ ID NO: 3650 - DNA, 120 bp, synthetic construct
  source 1..120: mol_type = other DNA
tgtttttaggtagttgttttgggagttttttttggtttgtttatttttttttttatatttgttttgtttaatatatgttaggttttttttagttagttattaaatattgtttatgtttaa

SEQ ID NO: 3651 - DNA, 120 bp, synthetic construct
  source 1..120: mol_type = other DNA
tattcccaaacaactactttaaaaacctctcctaatttatttattttttttttcataccccatttatttaacacatactaaatttttcccaactaactatcaaacattactcacatttaa

SEQ ID NO: 3652 - DNA, 120 bp, synthetic construct
  source 1..120: mol_type = other DNA
tgtttttaggtagttgttttgggagttttttttggtttgtttatttttttttttatattttgtttgtttaatatatgttaggttttttttagttagttattaaatattgtttatgtttaa

SEQ ID NO: 3653 - DNA, 120 bp, synthetic construct
  source 1..120: mol_type = other DNA
tattcccaaacaactactttaaaaacctctcctaatttatttattttttttttcatacccgctttatttaacacatactaaatttttcccaactaactatcaaacattactcacgtttaa

SEQ ID NO: 3654 - DNA, 120 bp, synthetic construct
  source 1..120: mol_type = other DNA
tgtttttaggtagttgttttgggagttttttttggtttgtttatttttttttttatattcgttttgtttaatatatgttaggttttttttagttagttattaaatattgtttacgtttaa

SEQ ID NO: 3655 - DNA, 120 bp, synthetic construct
  source 1..120: mol_type = other DNA
tattcccaaacaactactttaaaaacctctcctaatttatttattttttttttcataccccgtttatttaacacatactaaatttttcccaactaactatcaaacattactcacgtttaa

SEQ ID NO: 3656 - DNA, 120 bp, synthetic construct
  source 1..120: mol_type = other DNA
tgtttttaggtagttgttttgggagttttttttggtttgtttatttttttttttatatttcgtttgtttaatatatgttaggttttttttagttagttattaaatattgtttacgtttaa

SEQ ID NO: 3657 - DNA, 120 bp, synthetic construct
  source 1..120: mol_type = other DNA
ctatcaaattcttaaaaaacctatacacatttatttatcattatataacctactacaactaaccctatatccttcatcctaataatccatttaccttcatttccttcaccaattaccaac

SEQ ID NO: 3658 - DNA, 120 bp, synthetic construct
  source 1..120: mol_type = other DNA
ttgttaagtttttgaggggtttgtgtatatttatttattattgtataatttgttgtaattgattttgtattttttattttagtggtttatttatttttattttttttattaattattaat

SEQ ID NO: 3659 - DNA, 120 bp, synthetic construct
  source 1..120: mol_type = other DNA
ctatcaaattcttaaaaaacctatacacatttatttatcattatataacctactacaactctccctatatccttcatcctaataatccatttaccttcatttccttcaccaattaccaac

SEQ ID NO: 3660 - DNA, 120 bp, synthetic construct
  source 1..120: mol_type = other DNA
ttgttaagtttttgaggggtttgtgtatatttatttattattgtataatttgttgtaattttttttgtattttttattttagtggtttatttatttttattttttttattaattattaat

SEQ ID NO: 3661 - DNA, 120 bp, synthetic construct; identical to SEQ ID NO: 3657
  source 1..120: mol_type = other DNA

SEQ ID NO: 3662 - DNA, 120 bp, synthetic construct; identical to SEQ ID NO: 3658
  source 1..120: mol_type = other DNA

SEQ ID NO: 3663 - DNA, 120 bp, synthetic construct; identical to SEQ ID NO: 3659
  source 1..120: mol_type = other DNA

SEQ ID NO: 3664 - DNA, 120 bp, synthetic construct; identical to SEQ ID NO: 3660
  source 1..120: mol_type = other DNA

SEQ ID NO: 3665 - DNA, 120 bp, synthetic construct
  source 1..120: mol_type = other DNA
aaaaaaaaaaaatactattacataaataaaaactattcaaatctccacaccttaaaaaacaacttaaaccctaaaaaacaataacaaaaaaaaaaatattataataactaataattacaa

SEQ ID NO: 3666 - DNA, 120 bp, synthetic construct
  source 1..120: mol_type = other DNA
aagaagaaggaatgttattatataaatgaaggttatttaaatttttatgttttgaggaataatttgagttttggagggtagtggtaggggaggaagtattatagtaattggtggttatag

SEQ ID NO: 3667 - DNA, 120 bp, synthetic construct
  source 1..120: mol_type = other DNA
aaaaaaaaaaaatactattacataaataaaaactattcaaatctccacaccttaaaaaactccttaaaccctaaaaaacaataacaaaaaaaaaaatattataataactaataattacaa

SEQ ID NO: 3668 - DNA, 120 bp, synthetic construct
  source 1..120: mol_type = other DNA
aagaagaaggaatgttattatataaatgaaggttatttaaatttttatgttttgaggaattttttgagttttggagggtagtggtaggggaggaagtattatagtaattggtggttatag

SEQ ID NO: 3669 - DNA, 120 bp, synthetic construct
  source 1..120: mol_type = other DNA
aaaaaaaaaaaatactattacataaataaaaactattcaaatctccacgccttaaaaaacaacttaaaccctaaaaaacaataacaaaaaaaaaaatattataataactaataattacaa

SEQ ID NO: 3670 - DNA, 120 bp, synthetic construct
  source 1..120: mol_type = other DNA
aagaagaaggaatgttattatataaatgaaggttatttaaatttttacgttttgaggaataatttgagttttggagggtagtggtaggggaggaagtattatagtaattggtggttatag

SEQ ID NO: 3671 - DNA, 120 bp, synthetic construct
  source 1..120: mol_type = other DNA
aaaaaaaaaaaatactattacataaataaaaactattcaaatctccacgccttaaaaaactccttaaaccctaaaaaacaataacaaaaaaaaaaatattataataactaataattacaa

SEQ ID NO: 3672 - DNA, 120 bp, synthetic construct
  source 1..120: mol_type = other DNA
aagaagaaggaatgttattatataaatgaaggttatttaaatttttacgttttgaggaattttttgagttttggagggtagtggtaggggaggaagtattatagtaattggtggttatag

SEQ ID NO: 3673 - DNA, 120 bp, synthetic construct
  source 1..120: mol_type = other DNA
aaaaaatctaatacaataaatatataaaaacaaacaaacaaacaataatatcttcaactatattacaacaaaaaataaacctactatcaaaaaattaaattcaattttacacaaatttat

SEQ ID NO: 3674 - DNA, 120 bp, synthetic construct
  source 1..120: mol_type = other DNA
aagaaatttaatataatgaatatgtagaaataaataaataaataataatatttttagttatgttgtagtaaagagtaagtttgttgttaaaaaattgagtttaattttatataaatttgt

SEQ ID NO: 3675 - DNA, 120 bp, synthetic construct
  source 1..120: mol_type = other DNA
aaaaaatctaatacaataaatatataaaaacaaacaaacaaacaataatatcttcaactaatttacaacaaaaaataaacctactatcaaaaaattaaattcaattttacacaaatttat

SEQ ID NO: 3676 - DNA, 120 bp, synthetic construct
  source 1..120: mol_type = other DNA
aagaaatttaatataatgaatatgtagaaataaataaataaataataatatttttagttaatttgtagtaaagagtaagtttgttgttaaaaaattgagtttaattttatataaatttgt

SEQ ID NO: 3677 - DNA, 120 bp, synthetic construct; identical to SEQ ID NO: 3673
  source 1..120: mol_type = other DNA

SEQ ID NO: 3678 - DNA, 120 bp, synthetic construct; identical to SEQ ID NO: 3674
  source 1..120: mol_type = other DNA

SEQ ID NO: 3679 - DNA, 120 bp, synthetic construct; identical to SEQ ID NO: 3675
  source 1..120: mol_type = other DNA

SEQ ID NO: 3680 - DNA, 120 bp, synthetic construct; identical to SEQ ID NO: 3676
  source 1..120: mol_type = other DNA

SEQ ID NO: 3681 - DNA, 120 bp, synthetic construct
  source 1..120: mol_type = other DNA
aaaaaaaaaatattatcaacttaatcaaaaaataattactctataacaaacaaaataccaaaacccctatcaacaaacacactatcctaaactctaaaacaccactaattatttaaaaaa

SEQ ID NO: 3682 - DNA, 120 bp, synthetic construct
  source 1..120: mol_type = other DNA
aagagaagagtattattaatttgattaagaaatagttgttttgtgatagatagggtattaaaatttttgttaataagtatattattttgaattttgggatattattggttgtttggggaa

SEQ ID NO: 3683 - DNA, 120 bp, synthetic construct
  source 1..120: mol_type = other DNA
aaaaaaaaaatattatcaacttaatcaaaaaataattactctataacaaacaaaataacaaaaaccctatcaacaaacacactatcctaaactctaaaacaccactaattatttaaaaaa

SEQ ID NO: 3684 - DNA, 120 bp, synthetic construct
  source 1..120: mol_type = other DNA
aagagaagagtattattaatttgattaagaaatagttgttttgtgatagatagggtaataaaaattttgttaataagtatattattttgaattttgggatattattggttgtttggggaa

SEQ ID NO: 3685 - DNA, 120 bp, synthetic construct; identical to SEQ ID NO: 3681
  source 1..120: mol_type = other DNA

SEQ ID NO: 3686 - DNA, 120 bp, synthetic construct; identical to SEQ ID NO: 3682
  source 1..120: mol_type = other DNA

SEQ ID NO: 3687 - DNA, 120 bp, synthetic construct; identical to SEQ ID NO: 3683
  source 1..120: mol_type = other DNA

SEQ ID NO: 3688 - DNA, 120 bp, synthetic construct; identical to SEQ ID NO: 3684
  source 1..120: mol_type = other DNA

SEQ ID NO: 3689 - DNA, 120 bp, synthetic construct
  source 1..120: mol_type = other DNA
acaaaaaccaactctaatcaacaaaaataccacaactcatcactctaacatcaaaacattctccaacacctcccacccctaccccaacctctacctcccaaaacacaaaacaaaatactt

SEQ ID NO: 3690 - DNA, 120 bp, synthetic construct
  source 1..120: mol_type = other DNA
atagggattagttttgattagtagaggtgttgtaatttattattttggtattagagtgttttttggtgttttttatttttattttagtttttattttttggggtatagagtagggtgttt

SEQ ID NO: 3691 - DNA, 120 bp, synthetic construct
  source 1..120: mol_type = other DNA
acaaaaaccaactctaatcaacaaaaataccacaactcatcactctaacatcaaaactttctcaaacacctcccacccctaccccaacctctacctcccaaaacacaaaacaaaatactt

SEQ ID NO: 3692 - DNA, 120 bp, synthetic construct
  source 1..120: mol_type = other DNA
atagggattagttttgattagtagaggtgttgtaatttattattttggtattagagtttttttgggtgttttttatttttattttagtttttattttttggggtatagagtagggtgttt

SEQ ID NO: 3693 - DNA, 120 bp, synthetic construct
  source 1..120: mol_type = other DNA
acaaaaaccaactctaatcaacaaaaataccgcaactcatcactctaacatcaaaacgttctccgacgcctcccacccctaccccaacctctacctcccgaaacacaaaacaaaatactt

SEQ ID NO: 3694 - DNA, 120 bp, synthetic construct
  source 1..120: mol_type = other DNA
atagggattagttttgattagtagaggtgtcgtaatttattattttggtattagagcgtttttcggcgttttttatttttattttagtttttatttttcggggtatagagtagggtgttt

SEQ ID NO: 3695 - DNA, 120 bp, synthetic construct
  source 1..120: mol_type = other DNA
acaaaaaccaactctaatcaacaaaaataccgcaactcatcactctaacatcaaaactttctcgaacgcctcccacccctaccccaacctctacctcccgaaacacaaaacaaaatactt

SEQ ID NO: 3696 - DNA, 120 bp, synthetic construct
  source 1..120: mol_type = other DNA
atagggattagttttgattagtagaggtgtcgtaatttattattttggtattagagttttttcgggcgttttttatttttattttagtttttatttttcggggtatagagtagggtgttt

SEQ ID NO: 3697 - DNA, 120 bp, synthetic construct
  source 1..120: mol_type = other DNA
actctaaactttataccctaaaaataactaaaccacaaaactaaatttttacaaaacattaaactctaaattaaataaaaacaaaacctcatctattctaaacaatttcttcttatctca

SEQ ID NO: 3698 - DNA, 120 bp, synthetic construct
  source 1..120: mol_type = other DNA
attttgggttttatattttgagggtaattgggttataaagttaaatttttgtaggatattgggttttgggttggataaggataaagttttgtttgttttggatagtttttttttatttta

SEQ ID NO: 3699 - DNA, 120 bp, synthetic construct
  source 1..120: mol_type = other DNA
actctaaactttataccctaaaaataactaaaccacaaaactaaatttttacaaaacattctactctaaattaaataaaaacaaaacctcatctattctaaacaatttcttcttatctca

SEQ ID NO: 3700 - DNA, 120 bp, synthetic construct
  source 1..120: mol_type = other DNA
attttgggttttatattttgagggtaattgggttataaagttaaatttttgtaggatattttgttttgggttggataaggataaagttttgtttgttttggatagtttttttttatttta

SEQ ID NO: 3701 - DNA, 120 bp, synthetic construct
  source 1..120: mol_type = other DNA
actctaaactttataccctaaaaataactaaaccacaaaactaaatttttacaaaacattaaactctaaattaaataaaaacaaaacctcgtctattctaaacaatttcttcttatctca

SEQ ID NO: 3702 - DNA, 120 bp, synthetic construct
  source 1..120: mol_type = other DNA
attttgggttttatattttgagggtaattgggttataaagttaaatttttgtaggatattgggttttgggttggataaggataaagtttcgtttgttttggatagtttttttttatttta

SEQ ID NO: 3703 - DNA, 120 bp, synthetic construct
  source 1..120: mol_type = other DNA
actctaaactttataccctaaaaataactaaaccacaaaactaaatttttacaaaacattctactctaaattaaataaaaacaaaacctcgtctattctaaacaatttcttcttatctca

SEQ ID NO: 3704 - DNA, 120 bp, synthetic construct
  source 1..120: mol_type = other DNA
attttgggttttatattttgagggtaattgggttataaagttaaatttttgtaggatattttgttttgggttggataaggataaagtttcgtttgttttggatagtttttttttatttta

SEQ ID NO: 3705 - DNA, 120 bp, synthetic construct
  source 1..120: mol_type = other DNA
acataattactatacttaaaaatattaaaaaaatcaataataacttaatattaaactttattcaactaatcaataacaaacctcatctttctaaaataaaataaacttaatatatatttt

SEQ ID NO: 3706 - DNA, 120 bp, synthetic construct
  source 1..120: mol_type = other DNA
atatggttgttgtatttaagaatattgggaaaattagtagtggtttgatattaggttttatttaattaattagtaataggttttatttttttggaatgaaataaatttaatatatgtttt

SEQ ID NO: 3707 - DNA, 120 bp, synthetic construct
  source 1..120: mol_type = other DNA
acataattactatacttaaaaatattaaaaaaatcaataataacttaatattaaactatattcacctaatcaataacaaacctcatctttctaaaataaaataaacttaatatatatttt

SEQ ID NO: 3708 - DNA, 120 bp, synthetic construct
  source 1..120: mol_type = other DNA
atatggttgttgtatttaagaatattgggaaaattagtagtggtttgatattaggttgtatttatttaattagtaataggttttatttttttggaatgaaataaatttaatatatgtttt

SEQ ID NO: 3709 - DNA, 120 bp, synthetic construct; identical to SEQ ID NO: 3705
  source 1..120: mol_type = other DNA

SEQ ID NO: 3710 - DNA, 120 bp, synthetic construct; identical to SEQ ID NO: 3706
  source 1..120: mol_type = other DNA

SEQ ID NO: 3711 - DNA, 120 bp, synthetic construct; identical to SEQ ID NO: 3707
  source 1..120: mol_type = other DNA

SEQ ID NO: 3712 - DNA, 120 bp, synthetic construct; identical to SEQ ID NO: 3708
  source 1..120: mol_type = other DNA

SEQ ID NO: 3713 - DNA, 120 bp, synthetic construct
  source 1..120: mol_type = other DNA
cacataacaaccacaataatttaacaaaacatattaattttctaccctaaatttataaatctaccaaaaataaaaaactataaaaaaacataatttataataaaaaaaaataaaattaaa

SEQ ID NO: 3714 - DNA, 120 bp, synthetic construct
  source 1..120: mol_type = other DNA
tatatggtaattataataatttagtaaagtatattagttttttgttttgaatttataagtttattaagagtaagaggttataaagaaatatgatttatggtgggagagggtagaattaaa

SEQ ID NO: 3715 - DNA, 120 bp, synthetic construct
  source 1..120: mol_type = other DNA
cacataacaaccacaataatttaacaaaacatattaattttctaccctaaatttataaaactcccaaaaataaaaaactataaaaaaacataatttataataaaaaaaaataaaattaaa

SEQ ID NO: 3716 - DNA, 120 bp, synthetic construct
  source 1..120: mol_type = other DNA
tatatggtaattataataatttagtaaagtatattagttttttgttttgaatttataaggtttttaagagtaagaggttataaagaaatatgatttatggtgggagagggtagaattaaa

SEQ ID NO: 3717 - DNA, 120 bp, synthetic construct; identical to SEQ ID NO: 3713
  source 1..120: mol_type = other DNA

SEQ ID NO: 3718 - DNA, 120 bp, synthetic construct; identical to SEQ ID NO: 3714
  source 1..120: mol_type = other DNA

SEQ ID NO: 3719 - DNA, 120 bp, synthetic construct; identical to SEQ ID NO: 3715
  source 1..120: mol_type = other DNA

SEQ ID NO: 3720 - DNA, 120 bp, synthetic construct; identical to SEQ ID NO: 3716
  source 1..120: mol_type = other DNA

SEQ ID NO: 3721 - DNA, 120 bp, synthetic construct
  source 1..120: mol_type = other DNA
cctcatacaaaaaaactatatttcaaatcaaaaaaccaaaattaaaatcataaatttattactcattataaaatatttaatctctaacaaaccacttattccttttacacttaaatttac

SEQ ID NO: 3722 - DNA, 120 bp, synthetic construct
  source 1..120: mol_type = other DNA
ttttatgtaaaaggattgtattttgaattagaaggttagagttgggattatgaatttgttgtttattgtaagatatttgatttttggtaaattatttgttttttttatatttgagtttgt

SEQ ID NO: 3723 - DNA, 120 bp, synthetic construct
  source 1..120: mol_type = other DNA
cctcatacaaaaaaactatatttcaaatcaaaaaaccaaaattaaaatcataaattaattactcaatataaaatatttaatctctaacaaaccacttattccttttacacttaaatttac

SEQ ID NO: 3724 - DNA, 120 bp, synthetic construct
  source 1..120: mol_type = other DNA
ttttatgtaaaaggattgtattttgaattagaaggttagagttgggattatgaattagttgtttaatgtaagatatttgatttttggtaaattatttgttttttttatatttgagtttgt

SEQ ID NO: 3725 - DNA, 120 bp, synthetic construct
  source 1..120: mol_type = other DNA
cctcatacaaaaaaactatatttcgaatcaaaaaaccaaaattaaaatcataaatttattactcattataaaatatttaatctctaacaaaccacttattccttttacacttaaatttac

SEQ ID NO: 3726 - DNA, 120 bp, synthetic construct
  source 1..120: mol_type = other DNA
ttttatgtaaaaggattgtatttcgaattagaaggttagagttgggattatgaatttgttgtttattgtaagatatttgatttttggtaaattatttgttttttttatatttgagtttgt

SEQ ID NO: 3727 - DNA, 120 bp, synthetic construct
  source 1..120: mol_type = other DNA
cctcatacaaaaaaactatatttcgaatcaaaaaaccaaaattaaaatcataaattaattactcaatataaaatatttaatctctaacaaaccacttattccttttacacttaaatttac

SEQ ID NO: 3728 - DNA, 120 bp, synthetic construct
  source 1..120: mol_type = other DNA
ttttatgtaaaaggattgtatttcgaattagaaggttagagttgggattatgaattagttgtttaatgtaagatatttgatttttggtaaattatttgttttttttatatttgagtttgt

SEQ ID NO: 3729 - DNA, 120 bp, synthetic construct
  source 1..120: mol_type = other DNA
ctattccctaaaaacatcaaaatactctcaaaatacaataaaaatacataataaacaactaaaacacccctaaaaatccttatttctttcttatattaatattatcaatctatttattca

SEQ ID NO: 3730 - DNA, 120 bp, synthetic construct
  source 1..120: mol_type = other DNA
ttattttttggggatattggaatgtttttaagatgtaatgaggatgtatagtgagtagttaaaatatttttgaagatttttattttttttttatattggtgttattaatttatttattta

SEQ ID NO: 3731 - DNA, 120 bp, synthetic construct
  source 1..120: mol_type = other DNA
ctattccctaaaaacatcaaaatactctcaaaatacaataaaaatacataataaacaacaacaacacccctaaaaatccttatttctttcttatattaatattatcaatctatttattca

SEQ ID NO: 3732 - DNA, 120 bp, synthetic construct
  source 1..120: mol_type = other DNA
ttattttttggggatattggaatgtttttaagatgtaatgaggatgtatagtgagtagtgataatatttttgaagatttttattttttttttatattggtgttattaatttatttattta

SEQ ID NO: 3733 - DNA, 120 bp, synthetic construct
  source 1..120: mol_type = other DNA
ctattccctaaaaacatcgaaatactctcaaaatacaataaaaatacataataaacaactaaaacacccctaaaaatccttatttctttcttatattaatattatcaatctatttattca

SEQ ID NO: 3734 - DNA, 120 bp, synthetic construct
  source 1..120: mol_type = other DNA
ttattttttggggatatcggaatgtttttaagatgtaatgaggatgtatagtgagtagttaaaatatttttgaagatttttattttttttttatattggtgttattaatttatttattta

SEQ ID NO: 3735 - DNA, 120 bp, synthetic construct
  source 1..120: mol_type = other DNA
ctattccctaaaaacatcgaaatactctcaaaatacaataaaaatacataataaacaacgacaacacccctaaaaatccttatttctttcttatattaatattatcaatctatttattca

SEQ ID NO: 3736 - DNA, 120 bp, synthetic construct
  source 1..120: mol_type = other DNA
ttattttttggggatatcggaatgtttttaagatgtaatgaggatgtatagtgagtagcgataatatttttgaagatttttattttttttttatattggtgttattaatttatttattta

SEQ ID NO: 3737 - DNA, 120 bp, synthetic construct
  source 1..120: mol_type = other DNA
aaaaaaaaaaaaacttttcctactaaaaccaatctataaaaatataaaatatatctacttcttcaaaaatataaataccaatacaacaatacaaacataaaaaataattaaaaaaacata

SEQ ID NO: 3738 - DNA, 120 bp, synthetic construct
  source 1..120: mol_type = other DNA
gaggggggaagggttttttttgttgaaattagtttataaagatgtaagatatatttgtttttttaaaagtgtagatattaatgtaataatataagtataaggagtaattaggaaaatatg

SEQ ID NO: 3739 - DNA, 120 bp, synthetic construct
  source 1..120: mol_type = other DNA
aaaaaaaaaaaaacttttcctactaaaaccaatctataaaaatataaaatatatctactacatcaaaaatataaataccaatacaacaatacaaacataaaaaataattaaaaaaacata

SEQ ID NO: 3740 - DNA, 120 bp, synthetic construct
  source 1..120: mol_type = other DNA
gaggggggaagggttttttttgttgaaattagtttataaagatgtaagatatatttgttgtattaaaagtgtagatattaatgtaataatataagtataaggagtaattaggaaaatatg

SEQ ID NO: 3741 - DNA, 120 bp, synthetic construct; identical to SEQ ID NO: 3737
  source 1..120: mol_type = other DNA

SEQ ID NO: 3742 - DNA, 120 bp, synthetic construct; identical to SEQ ID NO: 3738
  source 1..120: mol_type = other DNA

SEQ ID NO: 3743 - DNA, 120 bp, synthetic construct; identical to SEQ ID NO: 3739
  source 1..120: mol_type = other DNA

SEQ ID NO: 3744 - DNA, 120 bp, synthetic construct; identical to SEQ ID NO: 3740
  source 1..120: mol_type = other DNA

SEQ ID NO: 3745 - DNA, 120 bp, synthetic construct
  source 1..120: mol_type = other DNA
accaccctaatttacaaataccaaaaaacaaaacaaatacatactcaaaaccaaaactaaatatctcacttaataacttttattaataaaatttcaaaatccatatctaaaaaaaatata

SEQ ID NO: 3746 - DNA, 120 bp, synthetic construct
  source 1..120: mol_type = other DNA
gttattttaatttgtagatattaggaaatggagtaggtatatgtttaaaattagaattgagtgttttatttggtggtttttattgataggattttaaaatttatgtttgaaagaaatgtg

SEQ ID NO: 3747 - DNA, 120 bp, synthetic construct
  source 1..120: mol_type = other DNA
accaccctaatttacaaataccaaaaaacaaaacaaatacatactcaaaaccaaaactataaatctcacttaataacttttattaataaaatttcaaaatccatatctaaaaaaaatata

SEQ ID NO: 3748 - DNA, 120 bp, synthetic construct
  source 1..120: mol_type = other DNA
gttattttaatttgtagatattaggaaatggagtaggtatatgtttaaaattagaattgtgagttttatttggtggtttttattgataggattttaaaatttatgtttgaaagaaatgtg

SEQ ID NO: 3749 - DNA, 120 bp, synthetic construct
  source 1..120: mol_type = other DNA
accaccctaatttacaaataccaaaaaacgaaacaaatacatactcaaaaccaaaactaaatatctcacttaataacttttattaataaaatttcaaaatccatatctaaaaaaaatata

SEQ ID NO: 3750 - DNA, 120 bp, synthetic construct
  source 1..120: mol_type = other DNA
gttattttaatttgtagatattaggaaacggagtaggtatatgtttaaaattagaattgagtgttttatttggtggtttttattgataggattttaaaatttatgtttgaaagaaatgtg

SEQ ID NO: 3751 - DNA, 120 bp, synthetic construct
  source 1..120: mol_type = other DNA
accaccctaatttacaaataccaaaaaacgaaacaaatacatactcaaaaccaaaactataaatctcacttaataacttttattaataaaatttcaaaatccatatctaaaaaaaatata

SEQ ID NO: 3752 - DNA, 120 bp, synthetic construct
  source 1..120: mol_type = other DNA
gttattttaatttgtagatattaggaaacggagtaggtatatgtttaaaattagaattgtgagttttatttggtggtttttattgataggattttaaaatttatgtttgaaagaaatgtg

SEQ ID NO: 3753 - DNA, 120 bp, synthetic construct
  source 1..120: mol_type = other DNA
tcactacaataaaccaaacaaatatcttattttctatataccacaatataaaaaaacctaaaaactacttctttaaaccatatactttaacctttcttcaaaactaaactaattttccaa

SEQ ID NO: 3754 - DNA, 120 bp, synthetic construct
  source 1..120: mol_type = other DNA
ttattatagtggattaaataaatattttattttttgtgtgttataatatgagaaaatttggaaattatttttttagattatgtgttttaatttttttttagaattgggttagttttttaa

SEQ ID NO: 3755 - DNA, 120 bp, synthetic construct
  source 1..120: mol_type = other DNA
tcactacaataaaccaaacaaatatcttattttctatataccacaatataaaaaaaactaaaaaatacttctttaaaccatatactttaacctttcttcaaaactaaactaattttccaa

SEQ ID NO: 3756 - DNA, 120 bp, synthetic construct
  source 1..120: mol_type = other DNA
ttattatagtggattaaataaatattttattttttgtgtgttataatatgagaaaagttggaaagtatttttttagattatgtgttttaatttttttttagaattgggttagttttttaa

SEQ ID NO: 3757 - DNA, 120 bp, synthetic construct; identical to SEQ ID NO: 3753
  source 1..120: mol_type = other DNA

SEQ ID NO: 3758 - DNA, 120 bp, synthetic construct; identical to SEQ ID NO: 3754
  source 1..120: mol_type = other DNA

SEQ ID NO: 3759 - DNA, 120 bp, synthetic construct; identical to SEQ ID NO: 3755
  source 1..120: mol_type = other DNA

SEQ ID NO: 3760 - DNA, 120 bp, synthetic construct; identical to SEQ ID NO: 3756
  source 1..120: mol_type = other DNA

SEQ ID NO: 3761 - DNA, 120 bp, synthetic construct
  source 1..120: mol_type = other DNA
attaaaaaaaaaaaataaaaaaactttataaaaactaaataccaacaaataataaactaaaaaaaaaaccaaaatataaacaatctaacttaaaaactataacttattctccacatttca

SEQ ID NO: 3762 - DNA, 120 bp, synthetic construct
  source 1..120: mol_type = other DNA
gttagagaaggaaaataaaaagattttataaaggttagatattagtaaatagtaaattgaggaagggattaggatataagtagtttagtttgaaagttatggtttattttttatatttta

SEQ ID NO: 3763 - DNA, 120 bp, synthetic construct
  source 1..120: mol_type = other DNA
attaaaaaaaaaaaataaaaaaactttataaaaactaaataccaacaaataataaactcaaacaaaaaccaaaatataaacaatctaacttaaaaactataacttattctccacatttca

SEQ ID NO: 3764 - DNA, 120 bp, synthetic construct
  source 1..120: mol_type = other DNA
gttagagaaggaaaataaaaagattttataaaggttagatattagtaaatagtaaatttaggtagggattaggatataagtagtttagtttgaaagttatggtttattttttatatttta

SEQ ID NO: 3765 - DNA, 120 bp, synthetic construct; identical to SEQ ID NO: 3761
  source 1..120: mol_type = other DNA

SEQ ID NO: 3766 - DNA, 120 bp, synthetic construct; identical to SEQ ID NO: 3762
  source 1..120: mol_type = other DNA

SEQ ID NO: 3767 - DNA, 120 bp, synthetic construct; identical to SEQ ID NO: 3763
  source 1..120: mol_type = other DNA

SEQ ID NO: 3768 - DNA, 120 bp, synthetic construct; identical to SEQ ID NO: 3764
  source 1..120: mol_type = other DNA

SEQ ID NO: 3769 - DNA, 120 bp, synthetic construct
  source 1..120: mol_type = other DNA
tctatattcctaaccaaaaatctcttcatcatccatatatcacctaaaaatacaatattttttaataaacaaaaataaaaactttaacattttactacctaaaaataaaatctaatacta

SEQ ID NO: 3770 - DNA, 120 bp, synthetic construct
  source 1..120: mol_type = other DNA
tttatatttttaattagaaatttttttattatttgtgtattatttaaggatgtaatattttttagtggataggaatagaagttttggtattttattgtttgggaataaaatttggtatta

SEQ ID NO: 3771 - DNA, 120 bp, synthetic construct
  source 1..120: mol_type = other DNA
tctatattcctaaccaaaaatctcttcatcatccatatatcacctaaaaatacaatattatataataaacaaaaataaaaactttaacattttactacctaaaaataaaatctaatacta

SEQ ID NO: 3772 - DNA, 120 bp, synthetic construct
  source 1..120: mol_type = other DNA
tttatatttttaattagaaatttttttattatttgtgtattatttaaggatgtaatattgtatagtggataggaatagaagttttggtattttattgtttgggaataaaatttggtatta

SEQ ID NO: 3773 - DNA, 120 bp, synthetic construct
  source 1..120: mol_type = other DNA
tctatattcctaaccaaaaatctcttcatcatccgtatatcacctaaaaatacaatattttttaataaacaaaaataaaaactttaacattttactacctaaaaataaaatctaatacta

SEQ ID NO: 3774 - DNA, 120 bp, synthetic construct
  source 1..120: mol_type = other DNA
tttatatttttaattagaaatttttttattattcgtgtattatttaaggatgtaatattttttagtggataggaatagaagttttggtattttattgtttgggaataaaatttggtatta

SEQ ID NO: 3775 - DNA, 120 bp, synthetic construct
  source 1..120: mol_type = other DNA
tctatattcctaaccaaaaatctcttcatcatccgtatatcacctaaaaatacaatattatataataaacaaaaataaaaactttaacattttactacctaaaaataaaatctaatacta

SEQ ID NO: 3776 - DNA, 120 bp, synthetic construct
  source 1..120: mol_type = other DNA
tttatatttttaattagaaatttttttattattcgtgtattatttaaggatgtaatattgtatagtggataggaatagaagttttggtattttattgtttgggaataaaatttggtatta

SEQ ID NO: 3777 - DNA, 120 bp, synthetic construct
  source 1..120: mol_type = other DNA
attcactaaaaataaaattaaaccaaaattaaatatctctaatttactctaaaatatttccaattaaaaaaatataaatacaactttcacatttacaaaaaaaaaaaaaaatttaatatt

SEQ ID NO: 3778 - DNA, 120 bp, synthetic construct
  source 1..120: mol_type = other DNA
atttattagaaatagaattgaattaggattgagtatttttaatttattttggaatatttttagttagaaaaatgtgaatgtagtttttatatttataaaaaaaaaaaagaatttaatatt

SEQ ID NO: 3779 - DNA, 120 bp, synthetic construct
  source 1..120: mol_type = other DNA
attcactaaaaataaaattaaaccaaaattaaatatctctaatttactctaaaatatttactattaaaaaaatataaatacaactttcacatttacaaaaaaaaaaaaaaatttaatatt

SEQ ID NO: 3780 - DNA, 120 bp, synthetic construct
  source 1..120: mol_type = other DNA
atttattagaaatagaattgaattaggattgagtatttttaatttattttggaatatttattgttagaaaaatgtgaatgtagtttttatatttataaaaaaaaaaaagaatttaatatt

SEQ ID NO: 3781 - DNA, 120 bp, synthetic construct; identical to SEQ ID NO: 3777
  source 1..120: mol_type = other DNA

SEQ ID NO: 3782 - DNA, 120 bp, synthetic construct; identical to SEQ ID NO: 3778
  source 1..120: mol_type = other DNA

SEQ ID NO: 3783 - DNA, 120 bp, synthetic construct; identical to SEQ ID NO: 3779
  source 1..120: mol_type = other DNA

SEQ ID NO: 3784 - DNA, 120 bp, synthetic construct; identical to SEQ ID NO: 3780
  source 1..120: mol_type = other DNA

SEQ ID NO: 3785 - DNA, 120 bp, synthetic construct
  source 1..120: mol_type = other DNA
cttctaaacataactaataatcattcttaccaaaaatcatccaaaaatataaacaaaaacatcacaaaaatcttccctcttaccctactccaaacaaaaataaaaacactcatcctaata

SEQ ID NO: 3786 - DNA, 120 bp, synthetic construct
  source 1..120: mol_type = other DNA
tttttggatatggttggtggttatttttattgaaggttatttaaaagtgtgggtaggggtgttatagaaatttttttttttattttattttagatagaaataggagtgtttattttggtg

SEQ ID NO: 3787 - DNA, 120 bp, synthetic construct
  source 1..120: mol_type = other DNA
cttctaaacataactaataatcattcttaccaaaaatcatccaaaaatataaacaaaaaaaacacaaaaatcttccctcttaccctactccaaacaaaaataaaaacactcatcctaata

SEQ ID NO: 3788 - DNA, 120 bp, synthetic construct
  source 1..120: mol_type = other DNA
tttttggatatggttggtggttatttttattgaaggttatttaaaagtgtgggtagggggggtatagaaatttttttttttattttattttagatagaaataggagtgtttattttggtg

SEQ ID NO: 3789 - DNA, 120 bp, synthetic construct
  source 1..120: mol_type = other DNA
cttctaaacataactaataatcattcttaccgaaaatcatccaaaaatataaacaaaaacgtcacaaaaatcttccctcttaccctactccaaacaaaaataaaaacgctcatcctaata

SEQ ID NO: 3790 - DNA, 120 bp, synthetic construct
  source 1..120: mol_type = other DNA
tttttggatatggttggtggttatttttatcgaaggttatttaaaagtgtgggtaggggcgttatagaaatttttttttttattttattttagatagaaataggagcgtttattttggtg

SEQ ID NO: 3791 - DNA, 120 bp, synthetic construct
  source 1..120: mol_type = other DNA
cttctaaacataactaataatcattcttaccgaaaatcatccaaaaatataaacaaaaaaaacacaaaaatcttccctcttaccctactccaaacaaaaataaaaacgctcatcctaata

SEQ ID NO: 3792 - DNA, 120 bp, synthetic construct
  source 1..120: mol_type = other DNA
tttttggatatggttggtggttatttttatcgaaggttatttaaaagtgtgggtagggggggtatagaaatttttttttttattttattttagatagaaataggagcgtttattttggtg

SEQ ID NO: 3793 - DNA, 120 bp, synthetic construct
  source 1..120: mol_type = other DNA
atattatctatttttatcacccattcctctccaaaaaaaaaacatttattaatatatatactcaaaatttatcattcactaaactacaattaatcattaataaaattatacttattttac

SEQ ID NO: 3794 - DNA, 120 bp, synthetic construct
  source 1..120: mol_type = other DNA
gtgttgtttatttttgttatttatttttttttaaggaagaaatatttgttaatatatatatttagagtttgttatttattggattataattaattattggtaagattatgtttattttgt

SEQ ID NO: 3795 - DNA, 120 bp, synthetic construct
  source 1..120: mol_type = other DNA
atattatctatttttatcacccattcctctccaaaaaaaaaacatttattaatatatctactccaaatttatcattcactaaactacaattaatcattaataaaattatacttattttac

SEQ ID NO: 3796 - DNA, 120 bp, synthetic construct
  source 1..120: mol_type = other DNA
gtgttgtttatttttgttatttatttttttttaaggaagaaatatttgttaatatatttattttgagtttgttatttattggattataattaattattggtaagattatgtttattttgt

SEQ ID NO: 3797 - DNA, 120 bp, synthetic construct; identical to SEQ ID NO: 3793
  source 1..120: mol_type = other DNA

SEQ ID NO: 3798 - DNA, 120 bp, synthetic construct; identical to SEQ ID NO: 3794
  source 1..120: mol_type = other DNA

SEQ ID NO: 3799 - DNA, 120 bp, synthetic construct
  source 1..120: mol_type = other DNA
atattatctatttttatcacccattcctctccaaaaaaaaaacatttattaatatatctactccgaatttatcattcactaaactacaattaatcattaataaaattatacttattttac

SEQ ID NO: 3800 - DNA, 120 bp, synthetic construct
  source 1..120: mol_type = other DNA
gtgttgtttatttttgttatttatttttttttaaggaagaaatatttgttaatatatttatttcgagtttgttatttattggattataattaattattggtaagattatgtttattttgt

SEQ ID NO: 3801 - DNA, 120 bp, synthetic construct
  source 1..120: mol_type = other DNA
cccacaatacaaaaataaaaattaaaaatttactcttcttttccaataaatctaccaaaaactaacaaaaaaaaaactaaaaaaccttataatctatattaaacctcaaaaaaacctaaa

SEQ ID NO: 3802 - DNA, 120 bp, synthetic construct
  source 1..120: mol_type = other DNA
tttgtggtgtaaagataggggttgagggtttgttttttttttttagtgaatttgttggaggttgatggggagggagttggaaggttttgtagtttgtattgggttttagagagatttggg

SEQ ID NO: 3803 - DNA, 120 bp, synthetic construct
  source 1..120: mol_type = other DNA
cccacaatacaaaaataaaaattaaaaatttactcttcttttccaataaatctacaaaaaactaaaaaaaaaaaaactaaaaaaccttataatctatattaaacctcaaaaaaacctaaa

SEQ ID NO: 3804 - DNA, 120 bp, synthetic construct
  source 1..120: mol_type = other DNA
tttgtggtgtaaagataggggttgagggtttgttttttttttttagtgaatttgtgggaggttgagggggagggagttggaaggttttgtagtttgtattgggttttagagagatttggg

SEQ ID NO: 3805 - DNA, 120 bp, synthetic construct
  source 1..120: mol_type = other DNA
cccgcgatacaaaaataaaaattaaaaatttactcttcttttccaataaatctaccgaaaactaacgaaaaaaaaactaaaaaaccttataatctatattaaacctcaaaaaaacctaaa

SEQ ID NO: 3806 - DNA, 120 bp, synthetic construct
  source 1..120: mol_type = other DNA
ttcgcggtgtaaagataggggttgagggtttgttttttttttttagtgaatttgtcggaggttgacggggagggagttggaaggttttgtagtttgtattgggttttagagagatttggg

SEQ ID NO: 3807 - DNA, 120 bp, synthetic construct
  source 1..120: mol_type = other DNA
cccgcgatacaaaaataaaaattaaaaatttactcttcttttccaataaatctacgaaaaactaaaaaaaaaaaaactaaaaaaccttataatctatattaaacctcaaaaaaacctaaa

SEQ ID NO: 3808 - DNA, 120 bp, synthetic construct
  source 1..120: mol_type = other DNA
ttcgcggtgtaaagataggggttgagggtttgttttttttttttagtgaatttgcgggaggttgagggggagggagttggaaggttttgtagtttgtattgggttttagagagatttggg

SEQ ID NO: 3809 - DNA, 120 bp, synthetic construct
  source 1..120: mol_type = other DNA
atctcaaaaatccaaaaattcctaaataaaaaaacttctaccctatttaaaataaacatttctatttatatctacctattatataaaaattctaaataatacattattaaataaataaaa

SEQ ID NO: 3810 - DNA, 120 bp, synthetic construct
  source 1..120: mol_type = other DNA
gttttagaggtttagaagtttttgagtggaaagatttttgttttgtttaaaatgagtatttttatttgtatttgtttgttgtgtagaaattttgaataatatattattagataagtaaaa

SEQ ID NO: 3811 - DNA, 120 bp, synthetic construct
  source 1..120: mol_type = other DNA
atctcaaaaatccaaaaattcctaaataaaaaaacttctaccctatttaaaataaacattaatatttatatctacctattatataaaaattctaaataatacattattaaataaataaaa

SEQ ID NO: 3812 - DNA, 120 bp, synthetic construct
  source 1..120: mol_type = other DNA
gttttagaggtttagaagtttttgagtggaaagatttttgttttgtttaaaatgagtattaatatttgtatttgtttgttgtgtagaaattttgaataatatattattagataagtaaaa

SEQ ID NO: 3813 - DNA, 120 bp, synthetic construct; identical to SEQ ID NO: 3809
  source 1..120: mol_type = other DNA

SEQ ID NO: 3814 - DNA, 120 bp, synthetic construct; identical to SEQ ID NO: 3810
  source 1..120: mol_type = other DNA

SEQ ID NO: 3815 - DNA, 120 bp, synthetic construct; identical to SEQ ID NO: 3811
  source 1..120: mol_type = other DNA

SEQ ID NO: 3816 - DNA, 120 bp, synthetic construct; identical to SEQ ID NO: 3812
  source 1..120: mol_type = other DNA

SEQ ID NO: 3817 - DNA, 120 bp, synthetic construct
  source 1..120: mol_type = other DNA
tcttcaaataaaaacttaaataaacaccctacctaaactttcctaaccatattccacacaaaacttttcccctttaacacacaatatatccatcccatccccctcccattccaataaata

SEQ ID NO: 3818 - DNA, 120 bp, synthetic construct
  source 1..120: mol_type = other DNA
tttttagatgggggtttgggtggatgttttgtttgggtttttttgattgtgttttgtatggagttttttttttttggtatatagtgtatttattttattttttttttattttaataaata

SEQ ID NO: 3819 - DNA, 120 bp, synthetic construct
  source 1..120: mol_type = other DNA
tcttcaaataaaaacttaaataaacaccctacctaaactttcctaaccatattccacacattacttttcccctttaacacacaatatatccatcccatccccctcccattccaataaata

SEQ ID NO: 3820 - DNA, 120 bp, synthetic construct
  source 1..120: mol_type = other DNA
tttttagatgggggtttgggtggatgttttgtttgggtttttttgattgtgttttgtatgttgttttttttttttggtatatagtgtatttattttattttttttttattttaataaata

SEQ ID NO: 3821 - DNA, 120 bp, synthetic construct
  source 1..120: mol_type = other DNA
tcttcaaataaaaacttaaataaacgccctacctaaactttcctaaccgtattccgcacgaaacttttcccctttaacacacaatatatccatcccatccccctcccattccaataaata

SEQ ID NO: 3822 - DNA, 120 bp, synthetic construct
  source 1..120: mol_type = other DNA
tttttagatgggggtttgggtggacgttttgtttgggtttttttgatcgtgtttcgtacggagttttttttttttggtatatagtgtatttattttattttttttttattttaataaata

SEQ ID NO: 3823 - DNA, 120 bp, synthetic construct
  source 1..120: mol_type = other DNA
tcttcaaataaaaacttaaataaacgccctacctaaactttcctaaccgtattccgcacgttacttttcccctttaacacacaatatatccatcccatccccctcccattccaataaata

SEQ ID NO: 3824 - DNA, 120 bp, synthetic construct
  source 1..120: mol_type = other DNA
tttttagatgggggtttgggtggacgttttgtttgggtttttttgatcgtgtttcgtacgttgttttttttttttggtatatagtgtatttattttattttttttttattttaataaata

SEQ ID NO: 3825 - DNA, 120 bp, synthetic construct
  source 1..120: mol_type = other DNA
ttctactaaaacaatacacctttaaaaatttaaaaataaaaaataatacaaaatccctacaactaaaaatttttttattactactaaaaaacaaaaataaaaaatttaatatttaaattt

SEQ ID NO: 3826 - DNA, 120 bp, synthetic construct
  source 1..120: mol_type = other DNA
ttttgttaagatagtgtatttttggagatttagaagtaagaagtgatgtaggatttttgtggttgggaatttttttgttattattggaaagtaaggatgagaaatttggtgtttgggttt

SEQ ID NO: 3827 - DNA, 120 bp, synthetic construct
  source 1..120: mol_type = other DNA
ttctactaaaacaatacacctttaaaaatttaaaaataaaaaataatacaaaatccctactcctaaaaatttttttattactactaaaaaacaaaaataaaaaatttaatatttaaattt

SEQ ID NO: 3828 - DNA, 120 bp, synthetic construct
  source 1..120: mol_type = other DNA
ttttgttaagatagtgtatttttggagatttagaagtaagaagtgatgtaggatttttgtttttgggaatttttttgttattattggaaagtaaggatgagaaatttggtgtttgggttt

SEQ ID NO: 3829 - DNA, 120 bp, synthetic construct
  source 1..120: mol_type = other DNA
ttctactaaaacaatacacctttaaaaatttaaaaataaaaaataatacaaaatccctacgactaaaaatttttttattactactaaaaaacaaaaataaaaaatttaatatttaaattt

SEQ ID NO: 3830 - DNA, 120 bp, synthetic construct
  source 1..120: mol_type = other DNA
ttttgttaagatagtgtatttttggagatttagaagtaagaagtgatgtaggatttttgcggttgggaatttttttgttattattggaaagtaaggatgagaaatttggtgtttgggttt

SEQ ID NO: 3831 - DNA, 120 bp, synthetic construct; identical to SEQ ID NO: 3827
  source 1..120: mol_type = other DNA

SEQ ID NO: 3832 - DNA, 120 bp, synthetic construct; identical to SEQ ID NO: 3828
  source 1..120: mol_type = other DNA

SEQ ID NO: 3833 - DNA, 120 bp, synthetic construct
  source 1..120: mol_type = other DNA
cacttattactctaaaaaaaataaataaaaaataaaacttcataataaattaaaatttaaaattaaaaccaacatcattaaaataaaatataaacacaacatatattcaaaatctaatcc

SEQ ID NO: 3834 - DNA, 120 bp, synthetic construct
  source 1..120: mol_type = other DNA
tatttattattttgaaaaaaataagtggaaagtgaaattttataataaattggggtttaaaattgagattaatattattagggtaaaatgtgagtatagtatatatttagaatttaattt

SEQ ID NO: 3835 - DNA, 120 bp, synthetic construct
  source 1..120: mol_type = other DNA
cacttattactctaaaaaaaataaataaaaaataaaacttcataataaattaaaatataaaatttaaaccaacatcattaaaataaaatataaacacaacatatattcaaaatctaatcc

SEQ ID NO: 3836 - DNA, 120 bp, synthetic construct
  source 1..120: mol_type = other DNA
tatttattattttgaaaaaaataagtggaaagtgaaattttataataaattggggtgtaaaatttagattaatattattagggtaaaatgtgagtatagtatatatttagaatttaattt

SEQ ID NO: 3837 - DNA, 120 bp, synthetic construct; identical to SEQ ID NO: 3833
  source 1..120: mol_type = other DNA

SEQ ID NO: 3838 - DNA, 120 bp, synthetic construct; identical to SEQ ID NO: 3834
  source 1..120: mol_type = other DNA

SEQ ID NO: 3839 - DNA, 120 bp, synthetic construct; identical to SEQ ID NO: 3835
  source 1..120: mol_type = other DNA

SEQ ID NO: 3840 - DNA, 120 bp, synthetic construct; identical to SEQ ID NO: 3836
  source 1..120: mol_type = other DNA

SEQ ID NO: 3841 - DNA, 120 bp, synthetic construct
  source 1..120: mol_type = other DNA
aacttctttcaaataaaatcaatatcccaaatttcctcactatactaactactaaccttacactcataccaccctcattcccttccctccctaccctattcaaattaactttatatcaaa

SEQ ID NO: 3842 - DNA, 120 bp, synthetic construct
  source 1..120: mol_type = other DNA
ggttttttttaggtgagattgatgttttaggtttttttattgtgttggttgttagttttgtatttatattatttttatttttttttttttttgttttgtttaagttagttttatattaga

SEQ ID NO: 3843 - DNA, 120 bp, synthetic construct
  source 1..120: mol_type = other DNA
aacttctttcaaataaaatcaatatcccaaatttcctcactatactaactactaacattacactaataccaccctcattcccttccctccctaccctattcaaattaactttatatcaaa

SEQ ID NO: 3844 - DNA, 120 bp, synthetic construct
  source 1..120: mol_type = other DNA
ggttttttttaggtgagattgatgttttaggtttttttattgtgttggttgttagtgttgtattgatattatttttatttttttttttttttgttttgtttaagttagttttatattaga

SEQ ID NO: 3845 - DNA, 120 bp, synthetic construct
  source 1..120: mol_type = other DNA
aacttctttcaaataaaatcgatatcccaaatttcctcactatactaactactaaccttacactcataccaccctcattcccttccctccctaccctattcaaattaactttatatcaaa

SEQ ID NO: 3846 - DNA, 120 bp, synthetic construct
  source 1..120: mol_type = other DNA
ggttttttttaggtgagatcgatgttttaggtttttttattgtgttggttgttagttttgtatttatattatttttatttttttttttttttgttttgtttaagttagttttatattaga

SEQ ID NO: 3847 - DNA, 120 bp, synthetic construct
  source 1..120: mol_type = other DNA
aacttctttcaaataaaatcgatatcccaaatttcctcactatactaactactaacgttacactaataccaccctcattcccttccctccctaccctattcaaattaactttatatcaaa

SEQ ID NO: 3848 - DNA, 120 bp, synthetic construct
  source 1..120: mol_type = other DNA
ggttttttttaggtgagatcgatgttttaggtttttttattgtgttggttgttagcgttgtattgatattatttttatttttttttttttttgttttgtttaagttagttttatattaga

SEQ ID NO: 3849 - DNA, 120 bp, synthetic construct
  source 1..120: mol_type = other DNA
ataatacattacaataccccaatactaacaatctaaaaaacacaaactaattattttatatataaccccaaccaatttcattcaattaacttcataaatcaattcaaaaaataattaatt

SEQ ID NO: 3850 - DNA, 120 bp, synthetic construct
  source 1..120: mol_type = other DNA
atgatatgttataatgttttaatattgataatttgagaggtataaattaattattttgtgtgtaattttagttagttttatttgattagttttatgaattagtttaaaaggtgattaatt

SEQ ID NO: 3851 - DNA, 120 bp, synthetic construct
  source 1..120: mol_type = other DNA
ataatacattacaataccccaatactaacaatctaaaaaacacaaactaattattttctatatatccccaaccaatttcattcaattaacttcataaatcaattcaaaaaataattaatt

SEQ ID NO: 3852 - DNA, 120 bp, synthetic construct
  source 1..120: mol_type = other DNA
atgatatgttataatgttttaatattgataatttgagaggtataaattaattattttttgtgtatttttagttagttttatttgattagttttatgaattagtttaaaaggtgattaatt

SEQ ID NO: 3853 - DNA, 120 bp, synthetic construct
  source 1..120: mol_type = other DNA
ataatacgttacaataccccaatactaacaatctaaaaaacacaaactaattattttatatataaccccaaccaatttcattcgattaacttcataaatcaattcaaaaaataattaatt

SEQ ID NO: 3854 - DNA, 120 bp, synthetic construct
  source 1..120: mol_type = other DNA
atgatacgttataatgttttaatattgataatttgagaggtataaattaattattttgtgtgtaattttagttagttttattcgattagttttatgaattagtttaaaaggtgattaatt

SEQ ID NO: 3855 - DNA, 120 bp, synthetic construct
  source 1..120: mol_type = other DNA
ataatacgttacaataccccaatactaacaatctaaaaaacacaaactaattattttctatatatccccaaccaatttcattcgattaacttcataaatcaattcaaaaaataattaatt

SEQ ID NO: 3856 - DNA, 120 bp, synthetic construct
  source 1..120: mol_type = other DNA
atgatacgttataatgttttaatattgataatttgagaggtataaattaattattttttgtgtatttttagttagttttattcgattagttttatgaattagtttaaaaggtgattaatt

SEQ ID NO: 3857 - DNA, 120 bp, synthetic construct
  source 1..120: mol_type = other DNA
atatataaatacaatttaatatacaatacacaatataactaaaattttaaattactcaaatttacaaatacttttatccaaaatcattatttacatttaataatctttccattttatttt

SEQ ID NO: 3858 - DNA, 120 bp, synthetic construct
  source 1..120: mol_type = other DNA
atatgtaaatgtaatttaatatgtaatgtataatgtaattagaattttaggttatttaaatttatgaatatttttatttgagattattatttgtatttaataatttttttattttgtttt

SEQ ID NO: 3859 - DNA, 120 bp, synthetic construct
  source 1..120: mol_type = other DNA
atatataaatacaatttaatatacaatacacaatataactaaaattttaaattactaaaatttaaaaatacttttatccaaaatcattatttacatttaataatctttccattttatttt

SEQ ID NO: 3860 - DNA, 120 bp, synthetic construct
  source 1..120: mol_type = other DNA
atatgtaaatgtaatttaatatgtaatgtataatgtaattagaattttaggttattaaaatttaagaatatttttatttgagattattatttgtatttaataatttttttattttgtttt

SEQ ID NO: 3861 - DNA, 120 bp, synthetic construct
  source 1..120: mol_type = other DNA
atatataaatacaatttaatatacaatacacaatataactaaaattttaaattactcaaatttacgaatacttttatccgaaatcattatttacatttaataatctttccattttatttt

SEQ ID NO: 3862 - DNA, 120 bp, synthetic construct
  source 1..120: mol_type = other DNA
atatgtaaatgtaatttaatatgtaatgtataatgtaattagaattttaggttatttaaatttacgaatatttttattcgagattattatttgtatttaataatttttttattttgtttt

SEQ ID NO: 3863 - DNA, 120 bp, synthetic construct
  source 1..120: mol_type = other DNA
atatataaatacaatttaatatacaatacacaatataactaaaattttaaattactaaaatttaaaaatacttttatccgaaatcattatttacatttaataatctttccattttatttt

SEQ ID NO: 3864 - DNA, 120 bp, synthetic construct
  source 1..120: mol_type = other DNA
atatgtaaatgtaatttaatatgtaatgtataatgtaattagaattttaggttattaaaatttaagaatatttttattcgagattattatttgtatttaataatttttttattttgtttt

SEQ ID NO: 3865 - DNA, 120 bp, synthetic construct
  source 1..120: mol_type = other DNA
caaactcaattttttttccaattacatcttaaaaattatctacatatctataaaatcaaaatcatcatacataatatttaactcaacatcccaactaccatttcaaatacatttcttcat

SEQ ID NO: 3866 - DNA, 120 bp, synthetic construct
  source 1..120: mol_type = other DNA
tagatttaattttttttttagttatattttaaaggttatttatatgtttgtaaggttaaaattattatatatgatatttaatttagtattttaattgttattttagatgtatttttttat

SEQ ID NO: 3867 - DNA, 120 bp, synthetic construct
  source 1..120: mol_type = other DNA
caaactcaattttttttccaattacatcttaaaaattatctacatatctataaaaacaaaatcataatacataatatttaactcaacatcccaactaccatttcaaatacatttcttcat

SEQ ID NO: 3868 - DNA, 120 bp, synthetic construct
  source 1..120: mol_type = other DNA
tagatttaattttttttttagttatattttaaaggttatttatatgtttgtaagggtaaaattataatatatgatatttaatttagtattttaattgttattttagatgtatttttttat

SEQ ID NO: 3869 - DNA, 120 bp, synthetic construct; identical to SEQ ID NO: 3865
  source 1..120: mol_type = other DNA

SEQ ID NO: 3870 - DNA, 120 bp, synthetic construct; identical to SEQ ID NO: 3866
  source 1..120: mol_type = other DNA

SEQ ID NO: 3871 - DNA, 120 bp, synthetic construct; identical to SEQ ID NO: 3867
  source 1..120: mol_type = other DNA

SEQ ID NO: 3872 - DNA, 120 bp, synthetic construct; identical to SEQ ID NO: 3868
  source 1..120: mol_type = other DNA

SEQ ID NO: 3873 - DNA, 120 bp, synthetic construct
  source 1..120: mol_type = other DNA
aaaattaaaatctcaaatctttccaaaccatatacacaaacccacacatatacatatacttcttaatttctaaaacatatacaacctttctaaaattccctataaacatctttcaaatta

SEQ ID NO: 3874 - DNA, 120 bp, synthetic construct
  source 1..120: mol_type = other DNA
gagattgggattttaggtttttttaggttgtatgtatagatttatatatgtatatgtattttttgatttttggaatatgtataatttttttaaagttttttatggatattttttagatta

SEQ ID NO: 3875 - DNA, 120 bp, synthetic construct
  source 1..120: mol_type = other DNA
aaaattaaaatctcaaatctttccaaaccatatacacaaacccacacatatacatatccttctaaatttctaaaacatatacaacctttctaaaattccctataaacatctttcaaatta

SEQ ID NO: 3876 - DNA, 120 bp, synthetic construct
  source 1..120: mol_type = other DNA
gagattgggattttaggtttttttaggttgtatgtatagatttatatatgtatatgtttttttagatttttggaatatgtataatttttttaaagttttttatggatattttttagatta

SEQ ID NO: 3877 - DNA, 120 bp, synthetic construct
  source 1..120: mol_type = other DNA
aaaattaaaatctcaaatctttccaaaccgtatacacaaacccacacatatacatatacttcttaatttctaaaacatatacaacctttctaaaattccctataaacatctttcaaatta

SEQ ID NO: 3878 - DNA, 120 bp, synthetic construct
  source 1..120: mol_type = other DNA
gagattgggattttaggtttttttaggtcgtatgtatagatttatatatgtatatgtattttttgatttttggaatatgtataatttttttaaagttttttatggatattttttagatta

SEQ ID NO: 3879 - DNA, 120 bp, synthetic construct
  source 1..120: mol_type = other DNA
aaaattaaaatctcaaatctttccaaaccgtatacacaaacccacacatatacatatccttctaaatttctaaaacatatacaacctttctaaaattccctataaacatctttcaaatta

SEQ ID NO: 3880 - DNA, 120 bp, synthetic construct
  source 1..120: mol_type = other DNA
gagattgggattttaggtttttttaggtcgtatgtatagatttatatatgtatatgtttttttagatttttggaatatgtataatttttttaaagttttttatggatattttttagatta

SEQ ID NO: 3881 - DNA, 120 bp, synthetic construct
  source 1..120: mol_type = other DNA
tataacatcactacattactaaaatatcttaaatttaatctataaatttccctctactaataaattttacctataatatatttctatttaacaattttctataaacacattttaattctt

SEQ ID NO: 3882 - DNA, 120 bp, synthetic construct
  source 1..120: mol_type = other DNA
tatagtattattatattgttggggtattttgagtttgatttatgaatttttttttattgatgggttttatttatggtgtgtttttatttaatagttttttgtgaatatgttttagttttt

SEQ ID NO: 3883 - DNA, 120 bp, synthetic construct
  source 1..120: mol_type = other DNA
tataacatcactacattactaaaatatcttaaatttaatctataaatttccctctacaaataacttttacctataatatatttctatttaacaattttctataaacacattttaattctt

SEQ ID NO: 3884 - DNA, 120 bp, synthetic construct
  source 1..120: mol_type = other DNA
tatagtattattatattgttggggtattttgagtttgatttatgaatttttttttatagatggtttttatttatggtgtgtttttatttaatagttttttgtgaatatgttttagttttt

SEQ ID NO: 3885 - DNA, 120 bp, synthetic construct
  source 1..120: mol_type = other DNA
tataacatcactacattactaaaatatcttaaatttaatctataaatttccctctactaataaattttacctataatatatttctatttaacaattttctataaacacgttttaattctt

SEQ ID NO: 3886 - DNA, 120 bp, synthetic construct
  source 1..120: mol_type = other DNA
tatagtattattatattgttggggtattttgagtttgatttatgaatttttttttattgatgggttttatttatggtgtgtttttatttaatagttttttgtgaatacgttttagttttt

SEQ ID NO: 3887 - DNA, 120 bp, synthetic construct
  source 1..120: mol_type = other DNA
tataacatcactacattactaaaatatcttaaatttaatctataaatttccctctacaaataacttttacctataatatatttctatttaacaattttctataaacacgttttaattctt

SEQ ID NO: 3888 - DNA, 120 bp, synthetic construct
  source 1..120: mol_type = other DNA
tatagtattattatattgttggggtattttgagtttgatttatgaatttttttttatagatggtttttatttatggtgtgtttttatttaatagttttttgtgaatacgttttagttttt

SEQ ID NO: 3889 - DNA, 120 bp, synthetic construct
  source 1..120: mol_type = other DNA
accataaattcttaaataaataaacaattttcctaataaaaataaataactacaaaaaaaacatcaccccaacactaaccaaactttcacctataatcttaaattaattatctcattaaa

SEQ ID NO: 3890 - DNA, 120 bp, synthetic construct
  source 1..120: mol_type = other DNA
attatgaatttttgggtgagtgggtaatttttttgataagagtggatggttataagaaaggtattattttaatattggttagatttttatttataattttgggttagttgttttattgag

SEQ ID NO: 3891 - DNA, 120 bp, synthetic construct
  source 1..120: mol_type = other DNA
accataaattcttaaataaataaacaattttcctaataaaaataaataactacaaaaaataaatcaccccaacactaaccaaactttcacctataatcttaaattaattatctcattaaa

SEQ ID NO: 3892 - DNA, 120 bp, synthetic construct
  source 1..120: mol_type = other DNA
attatgaatttttgggtgagtgggtaatttttttgataagagtggatggttataagaaatgaattattttaatattggttagatttttatttataattttgggttagttgttttattgag

SEQ ID NO: 3893 - DNA, 120 bp, synthetic construct; identical to SEQ ID NO: 3889
  source 1..120: mol_type = other DNA

SEQ ID NO: 3894 - DNA, 120 bp, synthetic construct; identical to SEQ ID NO: 3890
  source 1..120: mol_type = other DNA

SEQ ID NO: 3895 - DNA, 120 bp, synthetic construct; identical to SEQ ID NO: 3891
  source 1..120: mol_type = other DNA

SEQ ID NO: 3896 - DNA, 120 bp, synthetic construct; identical to SEQ ID NO: 3892
  source 1..120: mol_type = other DNA

SEQ ID NO: 3897 - DNA, 120 bp, synthetic construct
  source 1..120: mol_type = other DNA
ctttcaattttctctttataaaaacctataaaaatatttttataaaaatttcaatattaaatcaactacacatattttaaataaaaatacttttctttaaacaccataaaatacatactt

SEQ ID NO: 3898 - DNA, 120 bp, synthetic construct
  source 1..120: mol_type = other DNA
tttttaattttttttttgtagaaatttgtaaagatgtttttatagaaattttagtattaaattagttatatatattttgaataagaatgtttttttttgaatattatggaatgtatgttt

SEQ ID NO: 3899 - DNA, 120 bp, synthetic construct
  source 1..120: mol_type = other DNA
ctttcaattttctctttataaaaacctataaaaatatttttataaaaatttcaatattataacaactacacatattttaaataaaaatacttttctttaaacaccataaaatacatactt

SEQ ID NO: 3900 - DNA, 120 bp, synthetic construct
  source 1..120: mol_type = other DNA
tttttaattttttttttgtagaaatttgtaaagatgtttttatagaaattttagtattatagtagttatatatattttgaataagaatgtttttttttgaatattatggaatgtatgttt

SEQ ID NO: 3901 - DNA, 120 bp, synthetic construct; identical to SEQ ID NO: 3897
  source 1..120: mol_type = other DNA

SEQ ID NO: 3902 - DNA, 120 bp, synthetic construct; identical to SEQ ID NO: 3898
  source 1..120: mol_type = other DNA

SEQ ID NO: 3903 - DNA, 120 bp, synthetic construct; identical to SEQ ID NO: 3899
  source 1..120: mol_type = other DNA

SEQ ID NO: 3904 - DNA, 120 bp, synthetic construct; identical to SEQ ID NO: 3900
  source 1..120: mol_type = other DNA

SEQ ID NO: 3905 - DNA, 120 bp, synthetic construct
  source 1..120: mol_type = other DNA
tataaacttccttcaaataaaaacctaactataaatcatctctcccaatacaactttataaaaatatctctaaaaatataatttctaaatctccaaaaatacatatcttaaaataaccca

SEQ ID NO: 3906 - DNA, 120 bp, synthetic construct
  source 1..120: mol_type = other DNA
tgtgagttttttttagatggaagtttagttgtgggttattttttttagtgtagttttgtaaaaatgtttttagaagtgtgatttttgagtttttagaaatgtatattttaaaataattta

SEQ ID NO: 3907 - DNA, 120 bp, synthetic construct
  source 1..120: mol_type = other DNA
tataaacttccttcaaataaaaacctaactataaatcatctctcccaatacaactttatcacaatatctctaaaaatataatttctaaatctccaaaaatacatatcttaaaataaccca

SEQ ID NO: 3908 - DNA, 120 bp, synthetic construct
  source 1..120: mol_type = other DNA
tgtgagttttttttagatggaagtttagttgtgggttattttttttagtgtagttttgttataatgtttttagaagtgtgatttttgagtttttagaaatgtatattttaaaataattta

SEQ ID NO: 3909 - DNA, 120 bp, synthetic construct; identical to SEQ ID NO: 3905
  source 1..120: mol_type = other DNA

SEQ ID NO: 3910 - DNA, 120 bp, synthetic construct; identical to SEQ ID NO: 3906
  source 1..120: mol_type = other DNA

SEQ ID NO: 3911 - DNA, 120 bp, synthetic construct; identical to SEQ ID NO: 3907
  source 1..120: mol_type = other DNA

SEQ ID NO: 3912 - DNA, 120 bp, synthetic construct; identical to SEQ ID NO: 3908
  source 1..120: mol_type = other DNA

SEQ ID NO: 3913 - DNA, 120 bp, synthetic construct
  source 1..120: mol_type = other DNA
tcctcccttatacttaaaaaataaatctctaaaccaaaaactcaaaaaaaaaatataaaaatttcccacaaatactatatcaaaacctaaaattcttaacaaatatacttataaactacc

SEQ ID NO: 3914 - DNA, 120 bp, synthetic construct
  source 1..120: mol_type = other DNA
tttttttttgtgtttaggaaatagatttttaggttaagaatttagaaaagagatgtgaaagttttttatagatgttatgttaaggtttgaggtttttagtaggtgtgtttatgggttgtt

SEQ ID NO: 3915 - DNA, 120 bp, synthetic construct
  source 1..120: mol_type = other DNA
tcctcccttatacttaaaaaataaatctctaaaccaaaaactcaaaaaaaaaatataaacaattcccacaaatactatatcaaaacctaaaattcttaacaaatatacttataaactacc

SEQ ID NO: 3916 - DNA, 120 bp, synthetic construct
  source 1..120: mol_type = other DNA
tttttttttgtgtttaggaaatagatttttaggttaagaatttagaaaagagatgtgaatgatttttatagatgttatgttaaggtttgaggtttttagtaggtgtgtttatgggttgtt

SEQ ID NO: 3917 - DNA, 120 bp, synthetic construct; identical to SEQ ID NO: 3913
  source 1..120: mol_type = other DNA

SEQ ID NO: 3918 - DNA, 120 bp, synthetic construct; identical to SEQ ID NO: 3914
  source 1..120: mol_type = other DNA

SEQ ID NO: 3919 - DNA, 120 bp, synthetic construct
  source 1..120: mol_type = other DNA
tcctcccttatacttaaaaaataaatctctaaaccaaaaactcaaaaaaaaaatataaacgattcccacaaatactatatcaaaacctaaaattcttaacaaatatacttataaactacc

SEQ ID NO: 3920 - DNA, 120 bp, synthetic construct
  source 1..120: mol_type = other DNA
tttttttttgtgtttaggaaatagatttttaggttaagaatttagaaaagagatgtgaacgatttttatagatgttatgttaaggtttgaggtttttagtaggtgtgtttatgggttgtt

SEQ ID NO: 3921 - DNA, 120 bp, synthetic construct
  source 1..120: mol_type = other DNA
acaatacactaactactttttactactacaattcttccaaaataaatcatctaaaaaactatttctaaaaattcataatacattattcctaaatatactctaaatatatatttataaaaa

SEQ ID NO: 3922 - DNA, 120 bp, synthetic construct
  source 1..120: mol_type = other DNA
gtagtatattgattgttttttgttattgtagtttttttaaaataggttatttgaaagattatttttggagatttatggtatattatttttgaatgtattttaagtgtatgtttgtggaaa

SEQ ID NO: 3923 - DNA, 120 bp, synthetic construct
  source 1..120: mol_type = other DNA
acaatacactaactactttttactactacaattcttccaaaataaatcatctaaaaaacaaattctaaaaattcataatacattattcctaaatatactctaaatatatatttataaaaa

SEQ ID NO: 3924 - DNA, 120 bp, synthetic construct
  source 1..120: mol_type = other DNA
gtagtatattgattgttttttgttattgtagtttttttaaaataggttatttgaaagatgaattttggagatttatggtatattatttttgaatgtattttaagtgtatgtttgtggaaa

SEQ ID NO: 3925 - DNA, 120 bp, synthetic construct; identical to SEQ ID NO: 3921
  source 1..120: mol_type = other DNA

SEQ ID NO: 3926 - DNA, 120 bp, synthetic construct; identical to SEQ ID NO: 3922
  source 1..120: mol_type = other DNA

SEQ ID NO: 3927 - DNA, 120 bp, synthetic construct
  source 1..120: mol_type = other DNA
acaatacactaactactttttactactacaattcttccaaaataaatcatctaaaaaacgaattctaaaaattcataatacattattcctaaatatactctaaatatatatttataaaaa

SEQ ID NO: 3928 - DNA, 120 bp, synthetic construct
  source 1..120: mol_type = other DNA
gtagtatattgattgttttttgttattgtagtttttttaaaataggttatttgaaagacgaattttggagatttatggtatattatttttgaatgtattttaagtgtatgtttgtggaaa

SEQ ID NO: 3929 - DNA, 120 bp, synthetic construct
  source 1..120: mol_type = other DNA
aaaaatatttcaaattatataaaaatcatattatttaaaatattaaatattaaattatatttaacaattacaaaatatttaatacaaaaattaaaactaaatatctaattatatttataa

SEQ ID NO: 3930 - DNA, 120 bp, synthetic construct
  source 1..120: mol_type = other DNA
agaaatattttaaattatatagaaattatattatttaaaatattaagtgttaaattatatttaataattgtaggatatttgatataagaattaaaattggatgtttggttatgtttatag

SEQ ID NO: 3931 - DNA, 120 bp, synthetic construct
  source 1..120: mol_type = other DNA
aaaaatatttcaaattatataaaaatcatattatttaaaatattaaatattaaataatatttaactattacaaaatatttaatacaaaaattaaaactaaatatctaattatatttataa

SEQ ID NO: 3932 - DNA, 120 bp, synthetic construct
  source 1..120: mol_type = other DNA
agaaatattttaaattatatagaaattatattatttaaaatattaagtgttaaatgatatttaattattgtaggatatttgatataagaattaaaattggatgtttggttatgtttatag

SEQ ID NO: 3933 - DNA, 120 bp, synthetic construct; identical to SEQ ID NO: 3929
  source 1..120: mol_type = other DNA

SEQ ID NO: 3934 - DNA, 120 bp, synthetic construct; identical to SEQ ID NO: 3930
  source 1..120: mol_type = other DNA

SEQ ID NO: 3935 - DNA, 120 bp, synthetic construct; identical to SEQ ID NO: 3931
  source 1..120: mol_type = other DNA

SEQ ID NO: 3936 - DNA, 120 bp, synthetic construct; identical to SEQ ID NO: 3932
  source 1..120: mol_type = other DNA

SEQ ID NO: 3937 - DNA, 120 bp, synthetic construct
  source 1..120: mol_type = other DNA
ttttctctacttatctaaacttttacaaaataaaaatcatactcacacttaaacatataaataaaattactaattaataaaattaataaatcctaattctacaaatactaaacaatttac

SEQ ID NO: 3938 - DNA, 120 bp, synthetic construct
  source 1..120: mol_type = other DNA
ttttttttgtttatttgaatttttataagatgaagattatatttatatttaagtatgtgaataagattgttaattaataaaattagtgaattttaattttataaatgttgagtagtttat

SEQ ID NO: 3939 - DNA, 120 bp, synthetic construct
  source 1..120: mol_type = other DNA
ttttctctacttatctaaacttttacaaaataaaaatcatactcacacttaaacatataataaaaattactaattaataaaattaataaatcctaattctacaaatactaaacaatttac

SEQ ID NO: 3940 - DNA, 120 bp, synthetic construct
  source 1..120: mol_type = other DNA
ttttttttgtttatttgaatttttataagatgaagattatatttatatttaagtatgtgataaagattgttaattaataaaattagtgaattttaattttataaatgttgagtagtttat

SEQ ID NO: 3941 - DNA, 120 bp, synthetic construct; identical to SEQ ID NO: 3937
  source 1..120: mol_type = other DNA

SEQ ID NO: 3942 - DNA, 120 bp, synthetic construct; identical to SEQ ID NO: 3938
  source 1..120: mol_type = other DNA

SEQ ID NO: 3943 - DNA, 120 bp, synthetic construct; identical to SEQ ID NO: 3939
  source 1..120: mol_type = other DNA

SEQ ID NO: 3944 - DNA, 120 bp, synthetic construct; identical to SEQ ID NO: 3940
  source 1..120: mol_type = other DNA

SEQ ID NO: 3945 - DNA, 120 bp, synthetic construct
  source 1..120: mol_type = other DNA
actcatattcccaaaactacaaaactaaaaattcattattaaataacaaacctatataacaatttcttcctatcctaatttacacttaatctcattctacctattaaatattcaaatccc

SEQ ID NO: 3946 - DNA, 120 bp, synthetic construct
  source 1..120: mol_type = other DNA
atttatatttttaagattgtgaggttggaagtttattattaagtaatagatttgtataataatttttttttattttaatttatatttgattttattttgtttgttgaatatttaggtttt

SEQ ID NO: 3947 - DNA, 120 bp, synthetic construct
  source 1..120: mol_type = other DNA
actcatattcccaaaactacaaaactaaaaattcattattaaataacaaacctatataactctttcttcctatcctaatttacacttaatctcattctacctattaaatattcaaatccc

SEQ ID NO: 3948 - DNA, 120 bp, synthetic construct
  source 1..120: mol_type = other DNA
atttatatttttaagattgtgaggttggaagtttattattaagtaatagatttgtataattttttttttttattttaatttatatttgattttattttgtttgttgaatatttaggtttt

SEQ ID NO: 3949 - DNA, 120 bp, synthetic construct
  source 1..120: mol_type = other DNA
actcatattcccaaaactacgaaactaaaaattcattattaaataacaaacctatataacaatttcttcctatcctaatttacacttaatctcattctacctattaaatattcaaatccc

SEQ ID NO: 3950 - DNA, 120 bp, synthetic construct
  source 1..120: mol_type = other DNA
atttatatttttaagattgcgaggttggaagtttattattaagtaatagatttgtataataatttttttttattttaatttatatttgattttattttgtttgttgaatatttaggtttt

SEQ ID NO: 3951 - DNA, 120 bp, synthetic construct
  source 1..120: mol_type = other DNA
actcatattcccaaaactacgaaactaaaaattcattattaaataacaaacctatataactctttcttcctatcctaatttacacttaatctcattctacctattaaatattcaaatccc

SEQ ID NO: 3952 - DNA, 120 bp, synthetic construct
  source 1..120: mol_type = other DNA
atttatatttttaagattgcgaggttggaagtttattattaagtaatagatttgtataattttttttttttattttaatttatatttgattttattttgtttgttgaatatttaggtttt

SEQ ID NO: 3953 - DNA, 120 bp, synthetic construct
  source 1..120: mol_type = other DNA
tccaaaaaccaatccacaaaaaaaatactctaaattccattcaaaaaaataccaaataattcttctactatcaaactaaacataaattcttaacaaaaaaaaaaaaacaaaaactaataa

SEQ ID NO: 3954 - DNA, 120 bp, synthetic construct
  source 1..120: mol_type = other DNA
tttagagattggtttataaaggaggtattttgggttttatttaggagggtgttagatgatttttttgttattagattgaatgtgagtttttggtagaggagaaggggtagaaattgatgg

SEQ ID NO: 3955 - DNA, 120 bp, synthetic construct
  source 1..120: mol_type = other DNA
tccaaaaaccaatccacaaaaaaaatactctaaattccattcaaaaaaataccaaataataattctactatcaaactaaacataaattcttaacaaaaaaaaaaaaacaaaaactaataa

SEQ ID NO: 3956 - DNA, 120 bp, synthetic construct
  source 1..120: mol_type = other DNA
tttagagattggtttataaaggaggtattttgggttttatttaggagggtgttagatgatgattttgttattagattgaatgtgagtttttggtagaggagaaggggtagaaattgatgg

SEQ ID NO: 3957 - DNA, 120 bp, synthetic construct
  source 1..120: mol_type = other DNA
tccaaaaaccgatccacaaaaaaaatactctaaattccattcaaaaaaataccaaataattcttctactatcaaactaaacgtaaattcttaacaaaaaaaaaaaaacaaaaactaataa

SEQ ID NO: 3958 - DNA, 120 bp, synthetic construct
  source 1..120: mol_type = other DNA
tttagagatcggtttataaaggaggtattttgggttttatttaggagggtgttagatgatttttttgttattagattgaacgtgagtttttggtagaggagaaggggtagaaattgatgg

SEQ ID NO: 3959 - DNA, 120 bp, synthetic construct
  source 1..120: mol_type = other DNA
tccaaaaaccgatccacaaaaaaaatactctaaattccattcaaaaaaataccaaataataattctactatcaaactaaacgtaaattcttaacaaaaaaaaaaaaacaaaaactaataa

SEQ ID NO: 3960 - DNA, 120 bp, synthetic construct
  source 1..120: mol_type = other DNA
tttagagatcggtttataaaggaggtattttgggttttatttaggagggtgttagatgatgattttgttattagattgaacgtgagtttttggtagaggagaaggggtagaaattgatgg

SEQ ID NO: 3961 - DNA, 120 bp, synthetic construct
  source 1..120: mol_type = other DNA
aattcaatacataacataacataaaccctcatacacactaaactatctctacataatcttctaaactataaataactacttaacccaaaatatccaaaaataccaccactacccaacaat

SEQ ID NO: 3962 - DNA, 120 bp, synthetic construct
  source 1..120: mol_type = other DNA
aatttagtgtatggtatagtatgggtttttatgtatattggattatttttgtatggttttttgggttgtaaatggttgtttaatttagagtgtttaaagatgttattattgtttagtagt

SEQ ID NO: 3963 - DNA, 120 bp, synthetic construct
  source 1..120: mol_type = other DNA
aattcaatacataacataacataaaccctcatacacactaaactatctctacataatcttaaaaactataaataactacttaacccaaaatatccaaaaataccaccactacccaacaat

SEQ ID NO: 3964 - DNA, 120 bp, synthetic construct
  source 1..120: mol_type = other DNA
aatttagtgtatggtatagtatgggtttttatgtatattggattatttttgtatggttttgggggttgtaaatggttgtttaatttagagtgtttaaagatgttattattgtttagtagt

SEQ ID NO: 3965 - DNA, 120 bp, synthetic construct; identical to SEQ ID NO: 3961
  source 1..120: mol_type = other DNA

SEQ ID NO: 3966 - DNA, 120 bp, synthetic construct; identical to SEQ ID NO: 3962
  source 1..120: mol_type = other DNA

SEQ ID NO: 3967 - DNA, 120 bp, synthetic construct; identical to SEQ ID NO: 3963
  source 1..120: mol_type = other DNA

SEQ ID NO: 3968 - DNA, 120 bp, synthetic construct; identical to SEQ ID NO: 3964
  source 1..120: mol_type = other DNA

SEQ ID NO: 3969 - DNA, 120 bp, synthetic construct
  source 1..120: mol_type = other DNA
aaaataaaaccaacataaaataaaaaaacccaaaaaaaaaaaacctccaacacaacctacaaccaaaaaaacaacaaacaaaaaaaccaacaataaaaccctaacaaaaatacctaaaaa

SEQ ID NO: 3970 - DNA, 120 bp, synthetic construct
  source 1..120: mol_type = other DNA
gaaatggagttagtgtggggtggggggatttagaagggaggggtttttagtataatttgtagttgaggggatggtgggtagaagggttggtagtgaggttttggtgaaggtgtttggaaa

SEQ ID NO: 3971 - DNA, 120 bp, synthetic construct
  source 1..120: mol_type = other DNA
aaaataaaaccaacataaaataaaaaaacccaaaaaaaaaaaacctccaacacaacctacccccaaaaaaacaacaaacaaaaaaaccaacaataaaaccctaacaaaaatacctaaaaa

SEQ ID NO: 3972 - DNA, 120 bp, synthetic construct
  source 1..120: mol_type = other DNA
gaaatggagttagtgtggggtggggggatttagaagggaggggtttttagtataatttgtttttgaggggatggtgggtagaagggttggtagtgaggttttggtgaaggtgtttggaaa

SEQ ID NO: 3973 - DNA, 120 bp, synthetic construct
  source 1..120: mol_type = other DNA
aaaataaaaccaacgtaaaataaaaaaacccaaaaaaaaaaaacctccaacacaacctacaaccgaaaaaacgacgaacaaaaaaaccgacaataaaaccctaacgaaaatacctaaaaa

SEQ ID NO: 3974 - DNA, 120 bp, synthetic construct
  source 1..120: mol_type = other DNA
gaaatggagttagcgtggggtggggggatttagaagggaggggtttttagtataatttgtagtcgaggggacggcgggtagaagggtcggtagtgaggttttggcgaaggtgtttggaaa

SEQ ID NO: 3975 - DNA, 120 bp, synthetic construct
  source 1..120: mol_type = other DNA
aaaataaaaccaacgtaaaataaaaaaacccaaaaaaaaaaaacctccaacacaacctacccccgaaaaaacgacgaacaaaaaaaccgacaataaaaccctaacgaaaatacctaaaaa

SEQ ID NO: 3976 - DNA, 120 bp, synthetic construct
  source 1..120: mol_type = other DNA
gaaatggagttagcgtggggtggggggatttagaagggaggggtttttagtataatttgttttcgaggggacggcgggtagaagggtcggtagtgaggttttggcgaaggtgtttggaaa

SEQ ID NO: 3977 - DNA, 120 bp, synthetic construct
  source 1..120: mol_type = other DNA
aaaaaaactataacaaaaacaaaaaaatctaaacatttaatcccaaaatttaataacctacataaatacaaacaacaaaaccaacctctcctttaaaaattcctaaaaataaaaaacttc

SEQ ID NO: 3978 - DNA, 120 bp, synthetic construct
  source 1..120: mol_type = other DNA
agaggagttatgatgagggtagagaggtttgggtatttgattttaaagtttgatgatttgtataaatatagataatgaagttagttttttttttgaagatttttgaaaatgaaaaatttt

SEQ ID NO: 3979 - DNA, 120 bp, synthetic construct
  source 1..120: mol_type = other DNA
aaaaaaactataacaaaaacaaaaaaatctaaacatttaatcccaaaatttaataacctaattaaatacaaacaacaaaaccaacctctcctttaaaaattcctaaaaataaaaaacttc

SEQ ID NO: 3980 - DNA, 120 bp, synthetic construct
  source 1..120: mol_type = other DNA
agaggagttatgatgagggtagagaggtttgggtatttgattttaaagtttgatgatttgattaaatatagataatgaagttagttttttttttgaagatttttgaaaatgaaaaatttt

SEQ ID NO: 3981 - DNA, 120 bp, synthetic construct
  source 1..120: mol_type = other DNA
aaaaaaactataacgaaaacaaaaaaatctaaacatttaatcccaaaatttaataacctacataaatacaaacaacgaaaccaacctctcctttaaaaattcctaaaaataaaaaacttc

SEQ ID NO: 3982 - DNA, 120 bp, synthetic construct
  source 1..120: mol_type = other DNA
agaggagttatgacgagggtagagaggtttgggtatttgattttaaagtttgatgatttgtataaatatagataacgaagttagttttttttttgaagatttttgaaaatgaaaaatttt

SEQ ID NO: 3983 - DNA, 120 bp, synthetic construct
  source 1..120: mol_type = other DNA
aaaaaaactataacgaaaacaaaaaaatctaaacatttaatcccaaaatttaataacctaattaaatacaaacaacgaaaccaacctctcctttaaaaattcctaaaaataaaaaacttc

SEQ ID NO: 3984 - DNA, 120 bp, synthetic construct
  source 1..120: mol_type = other DNA
agaggagttatgacgagggtagagaggtttgggtatttgattttaaagtttgatgatttgattaaatatagataacgaagttagttttttttttgaagatttttgaaaatgaaaaatttt

SEQ ID NO: 3985 - DNA, 120 bp, synthetic construct
  source 1..120: mol_type = other DNA
caaaacaaattaatccaatcaatataataatttaccaaaaaaaatctaccaatttaaccaccaacacttacttcaaacactacccacaaaattaaacaaacaatcatcatcatcatcatc

SEQ ID NO: 3986 - DNA, 120 bp, synthetic construct
  source 1..120: mol_type = other DNA
taagatagattaatttagttaatgtaatgatttgttagaaagaatttattagtttggttattagtatttattttaagtgttatttataaagttaaataagtaattattattattattatt

SEQ ID NO: 3987 - DNA, 120 bp, synthetic construct
  source 1..120: mol_type = other DNA
caaaacaaattaatccaatcaatataataatttaccaaaaaaaatctaccaatttaaccaaaaacacttacttcaaacactacccacaaaattaaacaaacaatcatcatcatcatcatc

SEQ ID NO: 3988 - DNA, 120 bp, synthetic construct
  source 1..120: mol_type = other DNA
taagatagattaatttagttaatgtaatgatttgttagaaagaatttattagtttggttaaaagtatttattttaagtgttatttataaagttaaataagtaattattattattattatt

SEQ ID NO: 3989 - DNA, 120 bp, synthetic construct
  source 1..120: mol_type = other DNA
caaaacaaattaatccaatcaatataataatttaccaaaaaaaatctaccaatttaaccaccaacacttacttcaaacgctacccacaaaattaaacaaacaatcatcatcatcatcatc

SEQ ID NO: 3990 - DNA, 120 bp, synthetic construct
  source 1..120: mol_type = other DNA
taagatagattaatttagttaatgtaatgatttgttagaaagaatttattagtttggttattagtatttattttaagcgttatttataaagttaaataagtaattattattattattatt

SEQ ID NO: 3991 - DNA, 120 bp, synthetic construct
  source 1..120: mol_type = other DNA
caaaacaaattaatccaatcaatataataatttaccaaaaaaaatctaccaatttaaccaaaaacacttacttcaaacgctacccacaaaattaaacaaacaatcatcatcatcatcatc

SEQ ID NO: 3992 - DNA, 120 bp, synthetic construct
  source 1..120: mol_type = other DNA
taagatagattaatttagttaatgtaatgatttgttagaaagaatttattagtttggttaaaagtatttattttaagcgttatttataaagttaaataagtaattattattattattatt

SEQ ID NO: 3993 - DNA, 120 bp, synthetic construct
  source 1..120: mol_type = other DNA
ccaactaaactaaaaaaaataataccctaaacaataaatcataaatcatcataactatcctcccactaaacaatctaaaaaccacccaattatcaatattaataattttataaaaatacc

SEQ ID NO: 3994 - DNA, 120 bp, synthetic construct
  source 1..120: mol_type = other DNA
ttagttggattgggagaaatgatgttttgagtaatgggttataggttattatggttgtttttttattggatagtttgggggttatttagttattagtattagtgattttgtgaaaatgtt

SEQ ID NO: 3995 - DNA, 120 bp, synthetic construct
  source 1..120: mol_type = other DNA
ccaactaaactaaaaaaaataataccctaaacaataaatcataaatcatcataactatccaaccactaaacaatctaaaaaccacccaattatcaatattaataattttataaaaatacc

SEQ ID NO: 3996 - DNA, 120 bp, synthetic construct
  source 1..120: mol_type = other DNA
ttagttggattgggagaaatgatgttttgagtaatgggttataggttattatggttgtttaattattggatagtttgggggttatttagttattagtattagtgattttgtgaaaatgtt

SEQ ID NO: 3997 - DNA, 120 bp, synthetic construct; identical to SEQ ID NO: 3993
  source 1..120: mol_type = other DNA

SEQ ID NO: 3998 - DNA, 120 bp, synthetic construct; identical to SEQ ID NO: 3994
  source 1..120: mol_type = other DNA

SEQ ID NO: 3999 - DNA, 120 bp, synthetic construct; identical to SEQ ID NO: 3995
  source 1..120: mol_type = other DNA

SEQ ID NO: 4000 - DNA, 120 bp, synthetic construct; identical to SEQ ID NO: 3996
  source 1..120: mol_type = other DNA

SEQ ID NO: 4001 - DNA, 120 bp, synthetic construct
  source 1..120: mol_type = other DNA
ctcttactctcatacaatttatattctaatttaaatattctaaatatttcatataaaatatcacaattaaaatatcacataaaaaaaatactttcaaaacttctctatttaataatttca

SEQ ID NO: 4002 - DNA, 120 bp, synthetic construct
  source 1..120: mol_type = other DNA
tttttgtttttatgtagtttatattttaatttggatattttaaatattttatgtagaatgttataattaagatattatataagaaagatatttttagagtttttttatttaataatttta

SEQ ID NO: 4003 - DNA, 120 bp, synthetic construct
  source 1..120: mol_type = other DNA
actctcatacaatttatattctaatttaaatattctaaatatttcatataaaatataaaataataccacaattaaaatatcacataaaaaaaatactttcaaaacttctctatttaataa

SEQ ID NO: 4004 - DNA, 120 bp, synthetic construct
  source 1..120: mol_type = other DNA
gtttttatgtagtttatattttaatttggatattttaaatattttatgtagaatgtgaaataatattataattaagatattatataagaaagatatttttagagtttttttatttaataa

SEQ ID NO: 4005 - DNA, 120 bp, synthetic construct; identical to SEQ ID NO: 4001
  source 1..120: mol_type = other DNA

SEQ ID NO: 4006 - DNA, 120 bp, synthetic construct; identical to SEQ ID NO: 4002
  source 1..120: mol_type = other DNA

SEQ ID NO: 4007 - DNA, 120 bp, synthetic construct; identical to SEQ ID NO: 4003
  source 1..120: mol_type = other DNA

SEQ ID NO: 4008 - DNA, 120 bp, synthetic construct; identical to SEQ ID NO: 4004
  source 1..120: mol_type = other DNA

SEQ ID NO: 4009 - DNA, 120 bp, synthetic construct
  source 1..120: mol_type = other DNA
ttaaatattaaatttcttaatttttatcataaatttttataatacattacaaatattttaaatattaattaaacctatataataataaataataaatttacaataaaactatattatacc

SEQ ID NO: 4010 - DNA, 120 bp, synthetic construct
  source 1..120: mol_type = other DNA
ttaggtattggattttttaatttttgttataaatttttgtaatgtattatagatattttaaatattagttaagtttatataataatgggtggtaggtttataataaagttatattatgtt

SEQ ID NO: 4011 - DNA, 120 bp, synthetic construct
  source 1..120: mol_type = other DNA
atattaaatttcttaatttttatcataaatttttataatacattacaaatattttaacttcaccatattaattaaacctatataataataaataataaatttacaataaaactatattat

SEQ ID NO: 4012 - DNA, 120 bp, synthetic construct
  source 1..120: mol_type = other DNA
gtattggattttttaatttttgttataaatttttgtaatgtattatagatattttaattttattatattagttaagtttatataataatgggtggtaggtttataataaagttatattat

SEQ ID NO: 4013 - DNA, 120 bp, synthetic construct; identical to SEQ ID NO: 4009
  source 1..120: mol_type = other DNA

SEQ ID NO: 4014 - DNA, 120 bp, synthetic construct; identical to SEQ ID NO: 4010
  source 1..120: mol_type = other DNA

SEQ ID NO: 4015 - DNA, 120 bp, synthetic construct; identical to SEQ ID NO: 4011
  source 1..120: mol_type = other DNA

SEQ ID NO: 4016 - DNA, 120 bp, synthetic construct; identical to SEQ ID NO: 4012
  source 1..120: mol_type = other DNA

SEQ ID NO: 4017 - DNA, 120 bp, synthetic construct
  source 1..120: mol_type = other DNA
ctcatacaacttaaatattcaaaatctataaaaaaacactaaattaaacatctaaaataatatacccatttttatctctctaaataatatccttcactattaattattaaaatatatttt

SEQ ID NO: 4018 - DNA, 120 bp, synthetic construct
  source 1..120: mol_type = other DNA
tttatgtaatttgagtatttggagtttgtagagaagtattagattaaatatttgaagtaatgtgtttatttttgtttttttggataatattttttattgttgattattaagatatgtttt

SEQ ID NO: 4019 - DNA, 120 bp, synthetic construct
  source 1..120: mol_type = other DNA
acaacttaaatattcaaaatctataaaaaaacactaaattaaacatctaaaataatatattaaaaatacccatttttatctctctaaataatatccttcactattaattattaaaatata

SEQ ID NO: 4020 - DNA, 120 bp, synthetic construct
  source 1..120: mol_type = other DNA
gtaatttgagtatttggagtttgtagagaagtattagattaaatatttgaagtaatgtattaaaagtgtttatttttgtttttttggataatattttttattgttgattattaagatatg

SEQ ID NO: 4021 - DNA, 120 bp, synthetic construct
  source 1..120: mol_type = other DNA
ctcatacaacttaaatattcgaaatctataaaaaaacactaaattaaacatctaaaataatatacccatttttatctctctaaataatatccttcactattaattattaaaatatatttt

SEQ ID NO: 4022 - DNA, 120 bp, synthetic construct
  source 1..120: mol_type = other DNA
tttatgtaatttgagtattcggagtttgtagagaagtattagattaaatatttgaagtaatgtgtttatttttgtttttttggataatattttttattgttgattattaagatatgtttt

SEQ ID NO: 4023 - DNA, 120 bp, synthetic construct
  source 1..120: mol_type = other DNA
acaacttaaatattcgaaatctataaaaaaacactaaattaaacatctaaaataatatattaaaaatacccatttttatctctctaaataatatccttcactattaattattaaaatata

SEQ ID NO: 4024 - DNA, 120 bp, synthetic construct
  source 1..120: mol_type = other DNA
gtaatttgagtattcggagtttgtagagaagtattagattaaatatttgaagtaatgtattaaaagtgtttatttttgtttttttggataatattttttattgttgattattaagatatg

SEQ ID NO: 4025 - DNA, 120 bp, synthetic construct
  source 1..120: mol_type = other DNA
attcctccaaattcatatatatacatctaacttatttttaataaatacaaaatattccacaaccacaatccaatcaacattttattctttataaataaacaaattaataccaatttctaa

SEQ ID NO: 4026 - DNA, 120 bp, synthetic construct
  source 1..120: mol_type = other DNA
atttttttgggtttatatgtgtatatttaatttatttttaatagatataaagtattttataattataatttaattaatattttattttttatagataaataagttaatattagtttttga

SEQ ID NO: 4027 - DNA, 120 bp, synthetic construct
  source 1..120: mol_type = other DNA
tccaaattcatatatatacatctaacttatttttaataaatacaaaatattccacaatataaacataccacaatccaatcaacattttattctttataaataaacaaattaataccaatt

SEQ ID NO: 4028 - DNA, 120 bp, synthetic construct
  source 1..120: mol_type = other DNA
tttgggtttatatgtgtatatttaatttatttttaatagatataaagtattttataatgtggatatattataatttaattaatattttattttttatagataaataagttaatattagtt

SEQ ID NO: 4029 - DNA, 120 bp, synthetic construct
  source 1..120: mol_type = other DNA
attcctccgaattcatatatatacatctaacttatttttaataaatacaaaatattccacaaccacaatccaatcaacattttattctttataaataaacaaattaataccaatttctaa

SEQ ID NO: 4030 - DNA, 120 bp, synthetic construct
  source 1..120: mol_type = other DNA
attttttcgggtttatatgtgtatatttaatttatttttaatagatataaagtattttataattataatttaattaatattttattttttatagataaataagttaatattagtttttga

SEQ ID NO: 4031 - DNA, 120 bp, synthetic construct
  source 1..120: mol_type = other DNA
tccgaattcatatatatacatctaacttatttttaataaatacaaaatattccacaatataaacataccacaatccaatcaacattttattctttataaataaacaaattaataccaatt

SEQ ID NO: 4032 - DNA, 120 bp, synthetic construct
  source 1..120: mol_type = other DNA
ttcgggtttatatgtgtatatttaatttatttttaatagatataaagtattttataatgtggatatattataatttaattaatattttattttttatagataaataagttaatattagtt

SEQ ID NO: 4033 - DNA, 120 bp, synthetic construct
  source 1..120: mol_type = other DNA
cccacccctctatcctaaaactccatctctcatcaaacatcctaaaaaaacaaaattcaaataataataacctataccataaccttcaacaacaatcacaaccatctacaaatatctcct

SEQ ID NO: 4034 - DNA, 120 bp, synthetic construct
  source 1..120: mol_type = other DNA
tttgtttttttgttttgagattttattttttattagatattttggagaaataaaatttgagtggtaatggtttgtgttgtggtttttagtagtagttataattgtttgtaagtgtttttt

SEQ ID NO: 4035 - DNA, 120 bp, synthetic construct
  source 1..120: mol_type = other DNA
ccctctatcctaaaactccatctctcatcaaacatcctaaaaaaacaaaattcaaataaataaaaataataataacctataccataaccttcaacaacaatcacaaccatctacaaatat

SEQ ID NO: 4036 - DNA, 120 bp, synthetic construct
  source 1..120: mol_type = other DNA
ttttttgttttgagattttattttttattagatattttggagaaataaaatttgagtgggtgagaatggtaatggtttgtgttgtggtttttagtagtagttataattgtttgtaagtgt

SEQ ID NO: 4037 - DNA, 120 bp, synthetic construct
  source 1..120: mol_type = other DNA
cccgcccctctatcctaaaactccatctctcatcaaacatcctaaaaaaacaaaattcgaataataataacctataccgtaaccttcaacaacaatcacaaccgtctacaaatatctcct

SEQ ID NO: 4038 - DNA, 120 bp, synthetic construct
  source 1..120: mol_type = other DNA
ttcgtttttttgttttgagattttattttttattagatattttggagaaataaaattcgagtggtaatggtttgtgtcgtggtttttagtagtagttataatcgtttgtaagtgtttttt

SEQ ID NO: 4039 - DNA, 120 bp, synthetic construct
  source 1..120: mol_type = other DNA
ccctctatcctaaaactccatctctcatcaaacatcctaaaaaaacaaaattcgaataaataaaaataataataacctataccgtaaccttcaacaacaatcacaaccgtctacaaatat

SEQ ID NO: 4040 - DNA, 120 bp, synthetic construct
  source 1..120: mol_type = other DNA
ttttttgttttgagattttattttttattagatattttggagaaataaaattcgagtgggtgagaatggtaatggtttgtgtcgtggtttttagtagtagttataatcgtttgtaagtgt

SEQ ID NO: 4041 - DNA, 120 bp, synthetic construct
  source 1..120: mol_type = other DNA
acataaaaaaataaaaattattaaaaaatccccaataaaaatcctaaaaccaaaaaaaataaaataaacaacacaacaaaaaaattccacaacaaatttaatcaaacaaaaaaaaaaatc

SEQ ID NO: 4042 - DNA, 120 bp, synthetic construct
  source 1..120: mol_type = other DNA
gtataaagagataagaattattaaaaggtttttagtggaaattttggggttaaaaaaaataaagtaaataatatagtagagggattttatagtagatttgattaggtagaagaaagaatt

SEQ ID NO: 4043 - DNA, 120 bp, synthetic construct
  source 1..120: mol_type = other DNA
aaaaaataaaaattattaaaaaatccccaataaaaatcctaaaaccaaaaaaaataaaatacctaaaataaacaacacaacaaaaaaattccacaacaaatttaatcaaacaaaaaaaaa

SEQ ID NO: 4044 - DNA, 120 bp, synthetic construct
  source 1..120: mol_type = other DNA
aagagataagaattattaaaaggtttttagtggaaattttggggttaaaaaaaataaagtatttgaagtaaataatatagtagagggattttatagtagatttgattaggtagaagaaag

SEQ ID NO: 4045 - DNA, 120 bp, synthetic construct; identical to SEQ ID NO: 4041
  source 1..120: mol_type = other DNA

SEQ ID NO: 4046 - DNA, 120 bp, synthetic construct; identical to SEQ ID NO: 4042
  source 1..120: mol_type = other DNA

SEQ ID NO: 4047 - DNA, 120 bp, synthetic construct; identical to SEQ ID NO: 4043
  source 1..120: mol_type = other DNA

SEQ ID NO: 4048 - DNA, 120 bp, synthetic construct; identical to SEQ ID NO: 4044
  source 1..120: mol_type = other DNA

SEQ ID NO: 4049 - DNA, 120 bp, synthetic construct
  source 1..120: mol_type = other DNA
ataacattcaaaaattatttctatatataattaaaaaactttcaaaaattaaccaaacttttttccactcaaatataaattatctttactacctatattaaaaaatatcaaattttattt

SEQ ID NO: 4050 - DNA, 120 bp, synthetic construct
  source 1..120: mol_type = other DNA
gtagtatttggagattatttttgtatgtaattaagagatttttaagggttagttagatttttttttatttaagtgtggattatttttgttatttgtgttaaagaatattaggttttgttt

SEQ ID NO: 4051 - DNA, 120 bp, synthetic construct
  source 1..120: mol_type = other DNA
aaaatataacattcaaaaattatttctatatataattaaaaaactttcaaaaattaaccaaactcaaatataaattatctttactacctatattaaaaaatatcaaattttatttcttat

SEQ ID NO: 4052 - DNA, 120 bp, synthetic construct
  source 1..120: mol_type = other DNA
aaggtgtagtatttggagattatttttgtatgtaattaagagatttttaagggttagttagatttaagtgtggattatttttgttatttgtgttaaagaatattaggttttgttttttat

SEQ ID NO: 4053 - DNA, 120 bp, synthetic construct
  source 1..120: mol_type = other DNA
ataacattcgaaaattatttctatatataattaaaaaactttcaaaaattaaccaaacttttttccactcaaatataaattatctttactacctatattaaaaaatatcaaattttattt

SEQ ID NO: 4054 - DNA, 120 bp, synthetic construct
  source 1..120: mol_type = other DNA
gtagtattcggagattatttttgtatgtaattaagagatttttaagggttagttagatttttttttatttaagtgtggattatttttgttatttgtgttaaagaatattaggttttgttt

SEQ ID NO: 4055 - DNA, 120 bp, synthetic construct
  source 1..120: mol_type = other DNA
aaaatataacattcgaaaattatttctatatataattaaaaaactttcaaaaattaaccaaactcaaatataaattatctttactacctatattaaaaaatatcaaattttatttcttat

SEQ ID NO: 4056 - DNA, 120 bp, synthetic construct
  source 1..120: mol_type = other DNA
aaggtgtagtattcggagattatttttgtatgtaattaagagatttttaagggttagttagatttaagtgtggattatttttgttatttgtgttaaagaatattaggttttgttttttat

SEQ ID NO: 4057 - DNA, 120 bp, synthetic construct
  source 1..120: mol_type = other DNA
cttccaactacataaaataaaatctaaactccacaacactcactattccaaacataaaacctttccactataaattccactctaaacttaaaaaacctaaaatcaacaaatccaataaaa

SEQ ID NO: 4058 - DNA, 120 bp, synthetic construct
  source 1..120: mol_type = other DNA
tttttagttgtatggaatgaagtttgggttttatagtatttattgttttagatatgagatttttttattgtgagttttattttgggtttggaaagtttggaattaatagatttaatgggg

SEQ ID NO: 4059 - DNA, 120 bp, synthetic construct
  source 1..120: mol_type = other DNA
caactacataaaataaaatctaaactccacaacactcactattccaaacataaaaccttataaaatttccactataaattccactctaaacttaaaaaacctaaaatcaacaaatccaat

SEQ ID NO: 4060 - DNA, 120 bp, synthetic construct
  source 1..120: mol_type = other DNA
tagttgtatggaatgaagtttgggttttatagtatttattgttttagatatgagattttataggatttttattgtgagttttattttgggtttggaaagtttggaattaatagatttaat

SEQ ID NO: 4061 - DNA, 120 bp, synthetic construct; identical to SEQ ID NO: 4057
  source 1..120: mol_type = other DNA

SEQ ID NO: 4062 - DNA, 120 bp, synthetic construct; identical to SEQ ID NO: 4058
  source 1..120: mol_type = other DNA

SEQ ID NO: 4063 - DNA, 120 bp, synthetic construct; identical to SEQ ID NO: 4059
  source 1..120: mol_type = other DNA

SEQ ID NO: 4064 - DNA, 120 bp, synthetic construct; identical to SEQ ID NO: 4060
  source 1..120: mol_type = other DNA

SEQ ID NO: 4065 - DNA, 120 bp, synthetic construct
  source 1..120: mol_type = other DNA
tttaaataatcacctatttatttataatatcatactaaacatacaaccataacatttctataaaaactatcaatattttttctaaattttaaatttaccaaacaaataaatataaatact

SEQ ID NO: 4066 - DNA, 120 bp, synthetic construct
  source 1..120: mol_type = other DNA
tttaggtaattatttatttgtttatagtattatgttagatatatagttatagtatttttataaggattattggtattttttttgagttttgggtttgttaagtaaataaatatggatatt

SEQ ID NO: 4067 - DNA, 120 bp, synthetic construct
  source 1..120: mol_type = other DNA
aaactttaaataatcacctatttatttataatatcatactaaacatacaaccataacatttctatcaatattttttctaaattttaaatttaccaaacaaataaatataaatacttttcc

SEQ ID NO: 4068 - DNA, 120 bp, synthetic construct
  source 1..120: mol_type = other DNA
gggttttaggtaattatttatttgtttatagtattatgttagatatatagttatagtatttttattggtattttttttgagttttgggtttgttaagtaaataaatatggatattttttt

SEQ ID NO: 4069 - DNA, 120 bp, synthetic construct
  source 1..120: mol_type = other DNA
tttaaataatcacctatttatttataatatcatactaaacatacaaccataacatttctataaaaactatcgatattttttctaaattttaaatttaccaaacaaataaatataaatact

SEQ ID NO: 4070 - DNA, 120 bp, synthetic construct
  source 1..120: mol_type = other DNA
tttaggtaattatttatttgtttatagtattatgttagatatatagttatagtatttttataaggattatcggtattttttttgagttttgggtttgttaagtaaataaatatggatatt

SEQ ID NO: 4071 - DNA, 120 bp, synthetic construct
  source 1..120: mol_type = other DNA
aaactttaaataatcacctatttatttataatatcatactaaacatacaaccataacatttctatcgatattttttctaaattttaaatttaccaaacaaataaatataaatacttttcc

SEQ ID NO: 4072 - DNA, 120 bp, synthetic construct
  source 1..120: mol_type = other DNA
gggttttaggtaattatttatttgtttatagtattatgttagatatatagttatagtatttttatcggtattttttttgagttttgggtttgttaagtaaataaatatggatattttttt

SEQ ID NO: 4073 - DNA, 120 bp, synthetic construct
  source 1..120: mol_type = other DNA
tatcttcatcttcactactttaccttcaaaaactttaactaacttataaacaaaaattaaacaactccaaaaaaaaataaaatttttaatttcataaatttaacataaatttactttccc

SEQ ID NO: 4074 - DNA, 120 bp, synthetic construct
  source 1..120: mol_type = other DNA
tgtttttatttttattattttatttttagagattttggttggtttataggtaagaattaaataattttaaaaagaggtagaatttttgattttatgggtttgatatagatttattttttt

SEQ ID NO: 4075 - DNA, 120 bp, synthetic construct
  source 1..120: mol_type = other DNA
ttcatcttcactactttaccttcaaaaactttaactaacttataaacaaaaattaaacaacaaaacaactccaaaaaaaaataaaatttttaatttcataaatttaacataaatttactt

SEQ ID NO: 4076 - DNA, 120 bp, synthetic construct
  source 1..120: mol_type = other DNA
tttatttttattattttatttttagagattttggttggtttataggtaagaattaaatagtaaagtaattttaaaaagaggtagaatttttgattttatgggtttgatatagatttattt

SEQ ID NO: 4077 - DNA, 120 bp, synthetic construct; identical to SEQ ID NO: 4073
  source 1..120: mol_type = other DNA

SEQ ID NO: 4078 - DNA, 120 bp, synthetic construct; identical to SEQ ID NO: 4074
  source 1..120: mol_type = other DNA

SEQ ID NO: 4079 - DNA, 120 bp, synthetic construct; identical to SEQ ID NO: 4075
  source 1..120: mol_type = other DNA

SEQ ID NO: 4080 - DNA, 120 bp, synthetic construct; identical to SEQ ID NO: 4076
  source 1..120: mol_type = other DNA

SEQ ID NO: 4081 - DNA, 120 bp, synthetic construct
  source 1..120: mol_type = other DNA
atattttaaaaaatctaataaataaaaaatacaaaaaaaaatcactataatttctaacacattataaacaaaaaaaaaaaataaaattaaatacaaatttttaaaaactactctattact

SEQ ID NO: 4082 - DNA, 120 bp, synthetic construct
  source 1..120: mol_type = other DNA
atattttaagaaatttggtaaatgaggaatatagaaaaaaattattgtgatttttgatatgttatgaatagaaaagaaagataaaattaaatataaatttttaaaagttattttattgtt

SEQ ID NO: 4083 - DNA, 120 bp, synthetic construct
  source 1..120: mol_type = other DNA
ttaaaaaatctaataaataaaaaatacaaaaaaaaatcactataatttctaacacataaactaacattataaacaaaaaaaaaaaataaaattaaatacaaatttttaaaaactactcta

SEQ ID NO: 4084 - DNA, 120 bp, synthetic construct
  source 1..120: mol_type = other DNA
ttaagaaatttggtaaatgaggaatatagaaaaaaattattgtgatttttgatatgtgggttaatattatgaatagaaaagaaagataaaattaaatataaatttttaaaagttatttta

SEQ ID NO: 4085 - DNA, 120 bp, synthetic construct
  source 1..120: mol_type = other DNA
atattttaaaaaatctaataaataaaaaatacaaaaaaaaatcactataatttctaacacgttataaacaaaaaaaaaaaataaaattaaatacaaatttttaaaaactactctattact

SEQ ID NO: 4086 - DNA, 120 bp, synthetic construct
  source 1..120: mol_type = other DNA
atattttaagaaatttggtaaatgaggaatatagaaaaaaattattgtgatttttgatacgttatgaatagaaaagaaagataaaattaaatataaatttttaaaagttattttattgtt

SEQ ID NO: 4087 - DNA, 120 bp, synthetic construct
  source 1..120: mol_type = other DNA
ttaaaaaatctaataaataaaaaatacaaaaaaaaatcactataatttctaacacgtaaactaacattataaacaaaaaaaaaaaataaaattaaatacaaatttttaaaaactactcta

SEQ ID NO: 4088 - DNA, 120 bp, synthetic construct
  source 1..120: mol_type = other DNA
ttaagaaatttggtaaatgaggaatatagaaaaaaattattgtgatttttgatacgtgggttaatattatgaatagaaaagaaagataaaattaaatataaatttttaaaagttatttta

SEQ ID NO: 4089 - DNA, 120 bp, synthetic construct
  source 1..120: mol_type = other DNA
cctcaaacataaacttaaaacaaaaaaaaattaaaattctaaaatttaacttccactcaaaaaaaataactacaaaaatattttaaaaaacattaaattcattacacctctttccttcct

SEQ ID NO: 4090 - DNA, 120 bp, synthetic construct
  source 1..120: mol_type = other DNA
ttttgggtgtgggtttggagtaaggaggaattgaagttttgaagtttaatttttatttagggagggtggttgtaggggtattttaggaagtattgagtttattgtatttttttttttttt

SEQ ID NO: 4091 - DNA, 120 bp, synthetic construct
  source 1..120: mol_type = other DNA
aacataaacttaaaacaaaaaaaaattaaaattctaaaatttaacttccactcaaaactctaaaataaaaataactacaaaaatattttaaaaaacattaaattcattacacctctttcc

SEQ ID NO: 4092 - DNA, 120 bp, synthetic construct
  source 1..120: mol_type = other DNA
ggtgtgggtttggagtaaggaggaattgaagttttgaagtttaatttttatttagggttttggggtgagggtggttgtaggggtattttaggaagtattgagtttattgtattttttttt

SEQ ID NO: 4093 - DNA, 120 bp, synthetic construct
  source 1..120: mol_type = other DNA
cctcgaacgtaaacttaaaacaaaaaaaaattaaaattctaaaatttaacttccactcaaaaaaaataactacaaaaatattttaaaaaacattaaattcattacacctctttccttcct

SEQ ID NO: 4094 - DNA, 120 bp, synthetic construct
  source 1..120: mol_type = other DNA
tttcgggcgtgggtttggagtaaggaggaattgaagttttgaagtttaatttttatttagggagggtggttgtaggggtattttaggaagtattgagtttattgtatttttttttttttt

SEQ ID NO: 4095 - DNA, 120 bp, synthetic construct
  source 1..120: mol_type = other DNA
aacgtaaacttaaaacaaaaaaaaattaaaattctaaaatttaacttccactcaaaactctaaaataaaaataactacaaaaatattttaaaaaacattaaattcattacacctctttcc

SEQ ID NO: 4096 - DNA, 120 bp, synthetic construct
  source 1..120: mol_type = other DNA
ggcgtgggtttggagtaaggaggaattgaagttttgaagtttaatttttatttagggttttggggtgagggtggttgtaggggtattttaggaagtattgagtttattgtattttttttt

SEQ ID NO: 4097 - DNA, 120 bp, synthetic construct
  source 1..120: mol_type = other DNA
tacacacctccttcaattttacaccctaaacaccaccctaactcaccctaatcctaaccctatttttcacataataccactctataaaatataaaacaaataaaaaaaaattcaataact

SEQ ID NO: 4098 - DNA, 120 bp, synthetic construct
  source 1..120: mol_type = other DNA
tatatattttttttagttttgtattttagatattattttgatttattttaattttgattttgttttttatatagtattattttgtaaaatgtaagataaataggaaaaaatttagtggtt

SEQ ID NO: 4099 - DNA, 120 bp, synthetic construct
  source 1..120: mol_type = other DNA
cacctccttcaattttacaccctaaacaccaccctaactcaccctaatcctaaccctaaaaaacatttttcacataataccactctataaaatataaaacaaataaaaaaaaattcaata

SEQ ID NO: 4100 - DNA, 120 bp, synthetic construct
  source 1..120: mol_type = other DNA
tattttttttagttttgtattttagatattattttgatttattttaattttgattttgggagatgttttttatatagtattattttgtaaaatgtaagataaataggaaaaaatttagtg

SEQ ID NO: 4101 - DNA, 120 bp, synthetic construct; identical to SEQ ID NO: 4097
  source 1..120: mol_type = other DNA

SEQ ID NO: 4102 - DNA, 120 bp, synthetic construct; identical to SEQ ID NO: 4098
  source 1..120: mol_type = other DNA

SEQ ID NO: 4103 - DNA, 120 bp, synthetic construct
  source 1..120: mol_type = other DNA
cacctccttcaattttacaccctaaacaccaccctaactcaccctaatcctaaccctaaaaaacgtttttcacataataccactctataaaatataaaacaaataaaaaaaaattcaata

SEQ ID NO: 4104 - DNA, 120 bp, synthetic construct
  source 1..120: mol_type = other DNA
tattttttttagttttgtattttagatattattttgatttattttaattttgattttgggagacgttttttatatagtattattttgtaaaatgtaagataaataggaaaaaatttagtg

SEQ ID NO: 4105 - DNA, 120 bp, synthetic construct
  source 1..120: mol_type = other DNA
ctttaaatctctataacataacataaatttctttaccactaacaacttaactttaaaattaactaaacttccttaaatatattaatttaattacaattcatacatctcttcctcaactcc

SEQ ID NO: 4106 - DNA, 120 bp, synthetic construct
  source 1..120: mol_type = other DNA
ttttgggtttttgtagtatgatataggtttttttattgttaataatttagttttggaattgattggatttttttgggtatgttaatttagttataatttatatattttttttttagtttt

SEQ ID NO: 4107 - DNA, 120 bp, synthetic construct
  source 1..120: mol_type = other DNA
aatctctataacataacataaatttctttaccactaacaacttaactttaaaattaaatcttaaaactaaacttccttaaatatattaatttaattacaattcatacatctcttcctcaa

SEQ ID NO: 4108 - DNA, 120 bp, synthetic construct
  source 1..120: mol_type = other DNA
ggtttttgtagtatgatataggtttttttattgttaataatttagttttggaattgagttttagaattggatttttttgggtatgttaatttagttataatttatatattttttttttag

SEQ ID NO: 4109 - DNA, 120 bp, synthetic construct
  source 1..120: mol_type = other DNA
ctttaaatctctataacataacataaatttctttaccgctaacaacttaactttaaaattaactaaacttccttaaatatattaatttaattacaattcatacatctcttcctcaactcc

SEQ ID NO: 4110 - DNA, 120 bp, synthetic construct
  source 1..120: mol_type = other DNA
ttttgggtttttgtagtatgatataggtttttttatcgttaataatttagttttggaattgattggatttttttgggtatgttaatttagttataatttatatattttttttttagtttt

SEQ ID NO: 4111 - DNA, 120 bp, synthetic construct
  source 1..120: mol_type = other DNA
aatctctataacataacataaatttctttaccgctaacaacttaactttaaaattaaatcttaaaactaaacttccttaaatatattaatttaattacaattcatacatctcttcctcaa

SEQ ID NO: 4112 - DNA, 120 bp, synthetic construct
  source 1..120: mol_type = other DNA
ggtttttgtagtatgatataggtttttttatcgttaataatttagttttggaattgagttttagaattggatttttttgggtatgttaatttagttataatttatatattttttttttag

SEQ ID NO: 4113 - DNA, 120 bp, synthetic construct
  source 1..120: mol_type = other DNA
attacaacctaaaaattacaaaaaaatacatctttaaaataatcattaatatcttctactaaaatatacataactcttcataacaatttaatacatcttacataaaaattacaataaaac

SEQ ID NO: 4114 - DNA, 120 bp, synthetic construct
  source 1..120: mol_type = other DNA
attatagtttgaaggttataaaggaatgtatttttagaatagttattagtattttttgttagaatatgtatgattttttgtgataatttaatatattttatatgaaaattataatggagt

SEQ ID NO: 4115 - DNA, 120 bp, synthetic construct
  source 1..120: mol_type = other DNA
aacctattacaacctaaaaattacaaaaaaatacatctttaaaataatcattaatatcttctacataactcttcataacaatttaatacatcttacataaaaattacaataaaaccacat

SEQ ID NO: 4116 - DNA, 120 bp, synthetic construct
  source 1..120: mol_type = other DNA
agtttattatagtttgaaggttataaaggaatgtatttttagaatagttattagtattttttgtatgattttttgtgataatttaatatattttatatgaaaattataatggagttatat

SEQ ID NO: 4117 - DNA, 120 bp, synthetic construct
  source 1..120: mol_type = other DNA
attacaacctaaaaattacaaaaaaatacatctttaaaataatcattaatatcttctactaaaatatacataactcttcgtaacaatttaatacatcttacataaaaattacaataaaac

SEQ ID NO: 4118 - DNA, 120 bp, synthetic construct
  source 1..120: mol_type = other DNA
attatagtttgaaggttataaaggaatgtatttttagaatagttattagtattttttgttagaatatgtatgatttttcgtgataatttaatatattttatatgaaaattataatggagt

SEQ ID NO: 4119 - DNA, 120 bp, synthetic construct
  source 1..120: mol_type = other DNA
aacctattacaacctaaaaattacaaaaaaatacatctttaaaataatcattaatatcttctacataactcttcgtaacaatttaatacatcttacataaaaattacaataaaaccacat

SEQ ID NO: 4120 - DNA, 120 bp, synthetic construct
  source 1..120: mol_type = other DNA
agtttattatagtttgaaggttataaaggaatgtatttttagaatagttattagtattttttgtatgatttttcgtgataatttaatatattttatatgaaaattataatggagttatat

SEQ ID NO: 4121 - DNA, 120 bp, synthetic construct
  source 1..120: mol_type = other DNA
aaaacatttaatttattctaaaaaaattcataacttaaattaaaacttaaaatattaccaatattccaaaaaataacatcaaaacaaaaatataaatcaaaaactttatttcatttacta

SEQ ID NO: 4122 - DNA, 120 bp, synthetic construct
  source 1..120: mol_type = other DNA
aagatatttgatttgttttgaaggaatttatggtttaggttggaatttaaaatgttgttgatattttaggaggtgatattagaataggaatatagattggggattttgttttatttgttg

SEQ ID NO: 4123 - DNA, 120 bp, synthetic construct
  source 1..120: mol_type = other DNA
tttaaaaacatttaatttattctaaaaaaattcataacttaaattaaaacttaaaatattaccaaaaaataacatcaaaacaaaaatataaatcaaaaactttatttcatttactaataa

SEQ ID NO: 4124 - DNA, 120 bp, synthetic construct
  source 1..120: mol_type = other DNA
tttaaagatatttgatttgttttgaaggaatttatggtttaggttggaatttaaaatgttgttaggaggtgatattagaataggaatatagattggggattttgttttatttgttgatga

SEQ ID NO: 4125 - DNA, 120 bp, synthetic construct
  source 1..120: mol_type = other DNA
aaaacatttaatttattctaaaaaaattcataacttaaattaaaacttaaaatattaccgatattccaaaaaataacatcaaaacaaaaatataaatcgaaaactttatttcatttacta

SEQ ID NO: 4126 - DNA, 120 bp, synthetic construct
  source 1..120: mol_type = other DNA
aagatatttgatttgttttgaaggaatttatggtttaggttggaatttaaaatgttgtcgatattttaggaggtgatattagaataggaatatagatcggggattttgttttatttgttg

SEQ ID NO: 4127 - DNA, 120 bp, synthetic construct
  source 1..120: mol_type = other DNA
tttaaaaacatttaatttattctaaaaaaattcataacttaaattaaaacttaaaatattaccaaaaaataacatcaaaacaaaaatataaatcgaaaactttatttcatttactaataa

SEQ ID NO: 4128 - DNA, 120 bp, synthetic construct
  source 1..120: mol_type = other DNA
tttaaagatatttgatttgttttgaaggaatttatggtttaggttggaatttaaaatgttgttaggaggtgatattagaataggaatatagatcggggattttgttttatttgttgatga

SEQ ID NO: 4129 - DNA, 120 bp, synthetic construct
  source 1..120: mol_type = other DNA
aaataaacaaaaaaaccaaaaaattcaaaaacttcctaatcatcatatctttaaaaatacaataatttacactaactatcaccaacacttttctaaacaccttatatatattaccttctt

SEQ ID NO: 4130 - DNA, 120 bp, synthetic construct
  source 1..120: mol_type = other DNA
gagtgaataagaaggttgaagaatttaaaggttttttgattattatatttttagggatgtaatgatttatattgattattgttaatatttttttaagtattttgtgtgtattattttttt

SEQ ID NO: 4131 - DNA, 120 bp, synthetic construct
  source 1..120: mol_type = other DNA
aacaaaaaaaccaaaaaattcaaaaacttcctaatcatcatatctttaaaaatacaaaattaataataatttacactaactatcaccaacacttttctaaacaccttatatatattacct

SEQ ID NO: 4132 - DNA, 120 bp, synthetic construct
  source 1..120: mol_type = other DNA
aataagaaggttgaagaatttaaaggttttttgattattatatttttagggatgtaagattaatgatgatttatattgattattgttaatatttttttaagtattttgtgtgtattattt

SEQ ID NO: 4133 - DNA, 120 bp, synthetic construct
  source 1..120: mol_type = other DNA
aaataaacaaaaaaaccgaaaaattcaaaaacttcctaatcatcatatctttaaaaatacaataatttacactaactatcgccaacacttttctaaacaccttatatatattaccttctt

SEQ ID NO: 4134 - DNA, 120 bp, synthetic construct
  source 1..120: mol_type = other DNA
gagtgaataagaaggtcgaagaatttaaaggttttttgattattatatttttagggatgtaatgatttatattgattatcgttaatatttttttaagtattttgtgtgtattattttttt

SEQ ID NO: 4135 - DNA, 120 bp, synthetic construct
  source 1..120: mol_type = other DNA
aacaaaaaaaccgaaaaattcaaaaacttcctaatcatcatatctttaaaaatacaaaattaataataatttacactaactatcgccaacacttttctaaacaccttatatatattacct

SEQ ID NO: 4136 - DNA, 120 bp, synthetic construct
  source 1..120: mol_type = other DNA
aataagaaggtcgaagaatttaaaggttttttgattattatatttttagggatgtaagattaatgatgatttatattgattatcgttaatatttttttaagtattttgtgtgtattattt

SEQ ID NO: 4137 - DNA, 120 bp, synthetic construct
  source 1..120: mol_type = other DNA
ttctatctttttaaacataaaataaaacatatcttattatttatactttctaatacaccactacaaaccacatataaacttacatcttatatattataaaatcacctttaaaaatatcaa

SEQ ID NO: 4138 - DNA, 120 bp, synthetic construct
  source 1..120: mol_type = other DNA
ttttatttttttaaatataaaatggagtatgttttgttatttgtattttttgatgtattattgtaggttatatataggtttgtattttatatattgtgaaattatttttaaaaatattaa

SEQ ID NO: 4139 - DNA, 120 bp, synthetic construct
  source 1..120: mol_type = other DNA
caaaattctatctttttaaacataaaataaaacatatcttattatttatactttctaatacaccacatataaacttacatcttatatattataaaatcacctttaaaaatatcaaaataa

SEQ ID NO: 4140 - DNA, 120 bp, synthetic construct
  source 1..120: mol_type = other DNA
tagaattttatttttttaaatataaaatggagtatgttttgttatttgtattttttgatgtgttatatataggtttgtattttatatattgtgaaattatttttaaaaatattaaggtga

SEQ ID NO: 4141 - DNA, 120 bp, synthetic construct; identical to SEQ ID NO: 4137
  source 1..120: mol_type = other DNA

SEQ ID NO: 4142 - DNA, 120 bp, synthetic construct; identical to SEQ ID NO: 4138
  source 1..120: mol_type = other DNA

SEQ ID NO: 4143 - DNA, 120 bp, synthetic construct
  source 1..120: mol_type = other DNA
caaaattctatctttttaaacataaaataaaacatatcttattatttatactttctaatacgccacatataaacttacatcttatatattataaaatcacctttaaaaatatcaaaataa

SEQ ID NO: 4144 - DNA, 120 bp, synthetic construct
  source 1..120: mol_type = other DNA
tagaattttatttttttaaatataaaatggagtatgttttgttatttgtattttttgatgcgttatatataggtttgtattttatatattgtgaaattatttttaaaaatattaaggtga

SEQ ID NO: 4145 - DNA, 120 bp, synthetic construct
  source 1..120: mol_type = other DNA
ttataataatttaataacttacaaaaaaaataatcaacaaaaacttcataaaaaaaataccattatcaaaaaccaaaaaaaaatatacttaaaaactatttataattaaatttaaaaaac

SEQ ID NO: 4146 - DNA, 120 bp, synthetic construct
  source 1..120: mol_type = other DNA
ttgtaataatttaataatttatagaagggatgattagtaaaagttttatagaagagatattattgttaaagattaagaaagagtatgtttaaaaattgtttataattgaatttgaaaaat

SEQ ID NO: 4147 - DNA, 120 bp, synthetic construct
  source 1..120: mol_type = other DNA
ataatttaataacttacaaaaaaaataatcaacaaaaacttcataaaaaaaataccatttaaaattattatcaaaaaccaaaaaaaaatatacttaaaaactatttataattaaatttaa

SEQ ID NO: 4148 - DNA, 120 bp, synthetic construct
  source 1..120: mol_type = other DNA
ataatttaataatttatagaagggatgattagtaaaagttttatagaagagatattatttaaaattattgttaaagattaagaaagagtatgtttaaaaattgtttataattgaatttga

SEQ ID NO: 4149 - DNA, 120 bp, synthetic construct; identical to SEQ ID NO: 4145
  source 1..120: mol_type = other DNA

SEQ ID NO: 4150 - DNA, 120 bp, synthetic construct; identical to SEQ ID NO: 4146
  source 1..120: mol_type = other DNA

SEQ ID NO: 4151 - DNA, 120 bp, synthetic construct; identical to SEQ ID NO: 4147
  source 1..120: mol_type = other DNA

SEQ ID NO: 4152 - DNA, 120 bp, synthetic construct; identical to SEQ ID NO: 4148
  source 1..120: mol_type = other DNA

SEQ ID NO: 4153 - DNA, 120 bp, synthetic construct
  source 1..120: mol_type = other DNA
ttttacccaattttttaccaaaattaccctttatattaatacaacataatccaacctaaaacattaattcatacttaaccattaaatcaatctaaaccaatcaaaatcctaaatttttaa

SEQ ID NO: 4154 - DNA, 120 bp, synthetic construct
  source 1..120: mol_type = other DNA
ttttatttagttttttgttaaaattattttttatgttggtataatataatttaatttaggatattgatttatgtttggttattgaattaatttggattaattagagttttggatttttaa

SEQ ID NO: 4155 - DNA, 120 bp, synthetic construct
  source 1..120: mol_type = other DNA
acccaattttttaccaaaattaccctttatattaatacaacataatccaacctaaaactacaattcattaattcatacttaaccattaaatcaatctaaaccaatcaaaatcctaaattt

SEQ ID NO: 4156 - DNA, 120 bp, synthetic construct
  source 1..120: mol_type = other DNA
atttagttttttgttaaaattattttttatgttggtataatataatttaatttaggattatagtttattgatttatgtttggttattgaattaatttggattaattagagttttggattt

SEQ ID NO: 4157 - DNA, 120 bp, synthetic construct; identical to SEQ ID NO: 4153
  source 1..120: mol_type = other DNA

SEQ ID NO: 4158 - DNA, 120 bp, synthetic construct; identical to SEQ ID NO: 4154
  source 1..120: mol_type = other DNA

SEQ ID NO: 4159 - DNA, 120 bp, synthetic construct; identical to SEQ ID NO: 4155
  source 1..120: mol_type = other DNA

SEQ ID NO: 4160 - DNA, 120 bp, synthetic construct; identical to SEQ ID NO: 4156
  source 1..120: mol_type = other DNA

SEQ ID NO: 4161 - DNA, 120 bp, synthetic construct
  source 1..120: mol_type = other DNA
atttactaataaaaaacatttctcaactataactataaatatatctatttattaatacacttttaacaatttttacttcatatactttataactatctttatatacataaactttataat

SEQ ID NO: 4162 - DNA, 120 bp, synthetic construct
  source 1..120: mol_type = other DNA
atttattgatggagggtattttttagttataattgtggatatgtttatttattaatgtatttttgatagtttttgttttatgtattttgtggttgtttttatgtgtgtaaattttataat

SEQ ID NO: 4163 - DNA, 120 bp, synthetic construct
  source 1..120: mol_type = other DNA
tataatttactaataaaaaacatttctcaactataactataaatatatctatttattaatacaatttttacttcatatactttataactatctttatatacataaactttataattttta

SEQ ID NO: 4164 - DNA, 120 bp, synthetic construct
  source 1..120: mol_type = other DNA
tataatttattgatggagggtattttttagttataattgtggatatgtttatttattaatgtagtttttgttttatgtattttgtggttgtttttatgtgtgtaaattttataattttta

SEQ ID NO: 4165 - DNA, 120 bp, synthetic construct
  source 1..120: mol_type = other DNA
atttactaataaaaaacatttctcaactataactataaatatatctatttattaatacacttttaacaatttttacttcatatactttataactatctttatatacgtaaactttataat

SEQ ID NO: 4166 - DNA, 120 bp, synthetic construct
  source 1..120: mol_type = other DNA
atttattgatggagggtattttttagttataattgtggatatgtttatttattaatgtatttttgatagtttttgttttatgtattttgtggttgtttttatgtgcgtaaattttataat

SEQ ID NO: 4167 - DNA, 120 bp, synthetic construct
  source 1..120: mol_type = other DNA
tataatttactaataaaaaacatttctcaactataactataaatatatctatttattaatacaatttttacttcatatactttataactatctttatatacgtaaactttataattttta

SEQ ID NO: 4168 - DNA, 120 bp, synthetic construct
  source 1..120: mol_type = other DNA
tataatttattgatggagggtattttttagttataattgtggatatgtttatttattaatgtagtttttgttttatgtattttgtggttgtttttatgtgcgtaaattttataattttta

SEQ ID NO: 4169 - DNA, 120 bp, synthetic construct
  source 1..120: mol_type = other DNA
ctccttaaccattcttcaaaataaactaaaatctcaaaaatatatattctaataaattcaaattcacatcttcactcaccaaaaaccaaaacaaaaatctctatatatctttccaaacct

SEQ ID NO: 4170 - DNA, 120 bp, synthetic construct
  source 1..120: mol_type = other DNA
ttttttgattattttttagaatgaattggagttttaggagtatgtattttgatgggtttagatttatatttttatttattaggaattagaatagaggtttttatgtatttttttagattt

SEQ ID NO: 4171 - DNA, 120 bp, synthetic construct
  source 1..120: mol_type = other DNA
aaatctccttaaccattcttcaaaataaactaaaatctcaaaaatatatattctaataaatcatcttcactcaccaaaaaccaaaacaaaaatctctatatatctttccaaacctcttac

SEQ ID NO: 4172 - DNA, 120 bp, synthetic construct
  source 1..120: mol_type = other DNA
aggtttttttgattattttttagaatgaattggagttttaggagtatgtattttgatgggttatttttatttattaggaattagaatagaggtttttatgtatttttttagattttttat

SEQ ID NO: 4173 - DNA, 120 bp, synthetic construct; identical to SEQ ID NO: 4169
  source 1..120: mol_type = other DNA

SEQ ID NO: 4174 - DNA, 120 bp, synthetic construct; identical to SEQ ID NO: 4170
  source 1..120: mol_type = other DNA

SEQ ID NO: 4175 - DNA, 120 bp, synthetic construct; identical to SEQ ID NO: 4171
  source 1..120: mol_type = other DNA

SEQ ID NO: 4176 - DNA, 120 bp, synthetic construct; identical to SEQ ID NO: 4172
  source 1..120: mol_type = other DNA

SEQ ID NO: 4177 - DNA, 120 bp, synthetic construct
  source 1..120: mol_type = other DNA
ctaataaaatttaaaaaaaaaattctaaaaaaaaaaatcaatcataatattaaaaaaatcaatcacaaccttaaaaaaacaaatcaaaaataaacataacataaacaattaaaaaaaaaa

SEQ ID NO: 4178 - DNA, 120 bp, synthetic construct
  source 1..120: mol_type = other DNA
ttaatgagatttaaaaaaaagattttaagaaaagaaattaattataatattagaagagttgattatagttttaggaggatagattaaagatgaatatgatataaataattaggaggaaga

SEQ ID NO: 4179 - DNA, 120 bp, synthetic construct
  source 1..120: mol_type = other DNA
taaatctaataaaatttaaaaaaaaaattctaaaaaaaaaaatcaatcataatattaaaaaaaccttaaaaaaacaaatcaaaaataaacataacataaacaattaaaaaaaaaacccct

SEQ ID NO: 4180 - DNA, 120 bp, synthetic construct
  source 1..120: mol_type = other DNA
tggatttaatgagatttaaaaaaaagattttaagaaaagaaattaattataatattagaagagttttaggaggatagattaaagatgaatatgatataaataattaggaggaagattttt

SEQ ID NO: 4181 - DNA, 120 bp, synthetic construct
  source 1..120: mol_type = other DNA
ctaataaaatttaaaaaaaaaattctaaaaaaaaaaatcaatcataatattaaaaaaatcgatcacaaccttaaaaaaacaaatcaaaaataaacataacataaacaattaaaaaaaaaa

SEQ ID NO: 4182 - DNA, 120 bp, synthetic construct
  source 1..120: mol_type = other DNA
ttaatgagatttaaaaaaaagattttaagaaaagaaattaattataatattagaagagtcgattatagttttaggaggatagattaaagatgaatatgatataaataattaggaggaaga

SEQ ID NO: 4183 - DNA, 120 bp, synthetic construct; identical to SEQ ID NO: 4179
  source 1..120: mol_type = other DNA

SEQ ID NO: 4184 - DNA, 120 bp, synthetic construct; identical to SEQ ID NO: 4180
  source 1..120: mol_type = other DNA

SEQ ID NO: 4185 - DNA, 120 bp, synthetic construct
  source 1..120: mol_type = other DNA
aaaaaaattaaaaaacatactcaaaattacccaaaaatacaaacttaaaaataaaacccaaataaataaataaaaccctaaaattaacctaaaaaaaactaaataatactcacctactac

SEQ ID NO: 4186 - DNA, 120 bp, synthetic construct
  source 1..120: mol_type = other DNA
agagaggttaagggatatgtttaaagttgtttagaggtgtagatttggggatggaatttaggtgggtagatgaggttttggggttggtttggggagggttgagtggtatttatttgttgt

SEQ ID NO: 4187 - DNA, 120 bp, synthetic construct
  source 1..120: mol_type = other DNA
aattaaaaaacatactcaaaattacccaaaaatacaaacttaaaaataaaacccaaatctcaactataaataaataaaaccctaaaattaacctaaaaaaaactaaataatactcaccta

SEQ ID NO: 4188 - DNA, 120 bp, synthetic construct
  source 1..120: mol_type = other DNA
ggttaagggatatgtttaaagttgtttagaggtgtagatttggggatggaatttaggttttagttgtgggtagatgaggttttggggttggtttggggagggttgagtggtatttatttg

SEQ ID NO: 4189 - DNA, 120 bp, synthetic construct; identical to SEQ ID NO: 4185
  source 1..120: mol_type = other DNA

SEQ ID NO: 4190 - DNA, 120 bp, synthetic construct; identical to SEQ ID NO: 4186
  source 1..120: mol_type = other DNA

SEQ ID NO: 4191 - DNA, 120 bp, synthetic construct; identical to SEQ ID NO: 4187
  source 1..120: mol_type = other DNA

SEQ ID NO: 4192 - DNA, 120 bp, synthetic construct; identical to SEQ ID NO: 4188
  source 1..120: mol_type = other DNA

SEQ ID NO: 4193 - DNA, 120 bp, synthetic construct
  source 1..120: mol_type = other DNA
aacaatacacatactcacaaacattttaatataaaaaaaaacactcaactttaaaaacaaaaaaaactttaaatcccaactctatactttactatataaatataaactattttatcttta

SEQ ID NO: 4194 - DNA, 120 bp, synthetic construct
  source 1..120: mol_type = other DNA
ggtggtgtatatatttataggtattttgatgtaggagaaagtatttggttttggaggtaaaagagattttgggttttggttttgtgttttattatgtgaatgtaggttattttattttta

SEQ ID NO: 4195 - DNA, 120 bp, synthetic construct
  source 1..120: mol_type = other DNA
aacaaacaatacacatactcacaaacattttaatataaaaaaaaacactcaactttaaaaactttaaatcccaactctatactttactatataaatataaactattttatctttaacttc

SEQ ID NO: 4196 - DNA, 120 bp, synthetic construct
  source 1..120: mol_type = other DNA
agtaggtggtgtatatatttataggtattttgatgtaggagaaagtatttggttttggaggttttgggttttggttttgtgttttattatgtgaatgtaggttattttatttttaatttt

SEQ ID NO: 4197 - DNA, 120 bp, synthetic construct
  source 1..120: mol_type = other DNA
aacgatacacatactcacaaacattttaatataaaaaaaaacactcgactttaaaaacaaaaaaaactttaaatcccgactctatactttactatataaatataaactattttatcttta

SEQ ID NO: 4198 - DNA, 120 bp, synthetic construct
  source 1..120: mol_type = other DNA
ggcggtgtatatatttataggtattttgatgtaggagaaagtattcggttttggaggtaaaagagattttgggtttcggttttgtgttttattatgtgaatgtaggttattttattttta

SEQ ID NO: 4199 - DNA, 120 bp, synthetic construct
  source 1..120: mol_type = other DNA
aacaaacgatacacatactcacaaacattttaatataaaaaaaaacactcgactttaaaaactttaaatcccgactctatactttactatataaatataaactattttatctttaacttc

SEQ ID NO: 4200 - DNA, 120 bp, synthetic construct
  source 1..120: mol_type = other DNA
agtaggcggtgtatatatttataggtattttgatgtaggagaaagtattcggttttggaggttttgggtttcggttttgtgttttattatgtgaatgtaggttattttatttttaatttt

SEQ ID NO: 4201 - DNA, 120 bp, synthetic construct
  source 1..120: mol_type = other DNA
tcatattccaataaaatacaattattaacaactatcacattccaataaatataactaaaaacataaaaaaaaaacaattattaacaaataatattctcaaattttctcttaaaaaaaaac

SEQ ID NO: 4202 - DNA, 120 bp, synthetic construct
  source 1..120: mol_type = other DNA
ttatattttagtaggatataattattaataattattatattttaataggtgtagttaaaaatataaaaaaaagatagttgttaataaatagtgtttttagatttttttttaaaaaggagt

SEQ ID NO: 4203 - DNA, 120 bp, synthetic construct
  source 1..120: mol_type = other DNA
aaatatcatattccaataaaatacaattattaacaactatcacattccaataaatataactaaaaaaaacaattattaacaaataatattctcaaattttctcttaaaaaaaaacacttt

SEQ ID NO: 4204 - DNA, 120 bp, synthetic construct
  source 1..120: mol_type = other DNA
aagtattatattttagtaggatataattattaataattattatattttaataggtgtagttaaaaaagatagttgttaataaatagtgtttttagatttttttttaaaaaggagtatttt

SEQ ID NO: 4205 - DNA, 120 bp, synthetic construct; identical to SEQ ID NO: 4201
  source 1..120: mol_type = other DNA

SEQ ID NO: 4206 - DNA, 120 bp, synthetic construct; identical to SEQ ID NO: 4202
  source 1..120: mol_type = other DNA

SEQ ID NO: 4207 - DNA, 120 bp, synthetic construct; identical to SEQ ID NO: 4203
  source 1..120: mol_type = other DNA

SEQ ID NO: 4208 - DNA, 120 bp, synthetic construct; identical to SEQ ID NO: 4204
  source 1..120: mol_type = other DNA

SEQ ID NO: 4209 - DNA, 120 bp, synthetic construct
  source 1..120: mol_type = other DNA
tcccataaaaaaatcaaaaaaaaccaaatataaccctaaaatctaaaaacccaacctaataaataaacctaacttctaaaactataataataaaaaataactaaaacaaaaaaaattcac

SEQ ID NO: 4210 - DNA, 120 bp, synthetic construct
  source 1..120: mol_type = other DNA
ttttatggggagattaaaaggggttgagtgtggttttagggtttgggggtttagtttggtgggtagatttggtttttgggattgtagtggtggaaggtggttggggtaggggaggtttat

SEQ ID NO: 4211 - DNA, 120 bp, synthetic construct
  source 1..120: mol_type = other DNA
taaaaaaatcaaaaaaaaccaaatataaccctaaaatctaaaaacccaacctaataaataaccccaaataaacctaacttctaaaactataataataaaaaataactaaaacaaaaaaaa

SEQ ID NO: 4212 - DNA, 120 bp, synthetic construct
  source 1..120: mol_type = other DNA
tggggagattaaaaggggttgagtgtggttttagggtttgggggtttagtttggtgggtgattttaggtagatttggtttttgggattgtagtggtggaaggtggttggggtaggggagg

SEQ ID NO: 4213 - DNA, 120 bp, synthetic construct
  source 1..120: mol_type = other DNA
tcccataaaaaaatcaaaaaaaaccgaatataaccctaaaatctaaaaacccaacctaataaataaacctaacttctaaaactataataataaaaaataactaaaacaaaaaaaattcac

SEQ ID NO: 4214 - DNA, 120 bp, synthetic construct
  source 1..120: mol_type = other DNA
ttttatggggagattaaaaggggtcgagtgtggttttagggtttgggggtttagtttggtgggtagatttggtttttgggattgtagtggtggaaggtggttggggtaggggaggtttat

SEQ ID NO: 4215 - DNA, 120 bp, synthetic construct
  source 1..120: mol_type = other DNA
taaaaaaatcaaaaaaaaccgaatataaccctaaaatctaaaaacccaacctaataaataaccccaaataaacctaacttctaaaactataataataaaaaataactaaaacaaaaaaaa

SEQ ID NO: 4216 - DNA, 120 bp, synthetic construct
  source 1..120: mol_type = other DNA
tggggagattaaaaggggtcgagtgtggttttagggtttgggggtttagtttggtgggtgattttaggtagatttggtttttgggattgtagtggtggaaggtggttggggtaggggagg

SEQ ID NO: 4217 - DNA, 120 bp, synthetic construct
  source 1..120: mol_type = other DNA
acaaacaacacaactaatacctctactcccacaaaaccctacacacaccaactctaaatttattcttatttaaataacatacaaaactcaccatcactaaactataactaaattaaaaaa

SEQ ID NO: 4218 - DNA, 120 bp, synthetic construct
  source 1..120: mol_type = other DNA
ataggtagtatagttggtgtttttgtttttgtggggttttgtatatattagttttgggtttgtttttgtttggataatatgtagaatttattattattagattgtgattgggttgaagga

SEQ ID NO: 4219 - DNA, 120 bp, synthetic construct
  source 1..120: mol_type = other DNA
actcacaaacaacacaactaatacctctactcccacaaaaccctacacacaccaactctaatatttaaataacatacaaaactcaccatcactaaactataactaaattaaaaaacaaaa

SEQ ID NO: 4220 - DNA, 120 bp, synthetic construct
  source 1..120: mol_type = other DNA
atttataggtagtatagttggtgtttttgtttttgtggggttttgtatatattagttttggtgtttggataatatgtagaatttattattattagattgtgattgggttgaaggataagg

SEQ ID NO: 4221 - DNA, 120 bp, synthetic construct
  source 1..120: mol_type = other DNA
acaaacaacacaactaatacctctactcccgcgaaaccctacacacaccaactctaaatttattcttatttaaataacatacaaaactcaccatcactaaactataactaaattaaaaaa

SEQ ID NO: 4222 - DNA, 120 bp, synthetic construct
  source 1..120: mol_type = other DNA
ataggtagtatagttggtgtttttgttttcgcggggttttgtatatattagttttgggtttgtttttgtttggataatatgtagaatttattattattagattgtgattgggttgaagga

SEQ ID NO: 4223 - DNA, 120 bp, synthetic construct
  source 1..120: mol_type = other DNA
actcacaaacaacacaactaatacctctactcccgcgaaaccctacacacaccaactctaatatttaaataacatacaaaactcaccatcactaaactataactaaattaaaaaacaaaa

SEQ ID NO: 4224 - DNA, 120 bp, synthetic construct
  source 1..120: mol_type = other DNA
atttataggtagtatagttggtgtttttgttttcgcggggttttgtatatattagttttggtgtttggataatatgtagaatttattattattagattgtgattgggttgaaggataagg

SEQ ID NO: 4225 - DNA, 120 bp, synthetic construct
  source 1..120: mol_type = other DNA
ttttaactattcacttacaaacataaataaaatttaaatttttctaaacaaataacaaaaaaaataaacaaaaattttaaaaaaataaattcaaaaaaataattaaaataataaaacata

SEQ ID NO: 4226 - DNA, 120 bp, synthetic construct
  source 1..120: mol_type = other DNA
ttttggttgtttatttataagtatgagtagggtttgggtttttttaagtaagtaatagggagaatgggtaagggttttgaggggataaatttaaaggagtaattaaaatgataaagtatg

SEQ ID NO: 4227 - DNA, 120 bp, synthetic construct
  source 1..120: mol_type = other DNA
ttacttttaactattcacttacaaacataaataaaatttaaatttttctaaacaaataacaaacaaaaattttaaaaaaataaattcaaaaaaataattaaaataataaaacataaaaca

SEQ ID NO: 4228 - DNA, 120 bp, synthetic construct
  source 1..120: mol_type = other DNA
ttatttttggttgtttatttataagtatgagtagggtttgggtttttttaagtaagtaataggtaagggttttgaggggataaatttaaaggagtaattaaaatgataaagtatggaata

SEQ ID NO: 4229 - DNA, 120 bp, synthetic construct; identical to SEQ ID NO: 4225
  source 1..120: mol_type = other DNA

SEQ ID NO: 4230 - DNA, 120 bp, synthetic construct; identical to SEQ ID NO: 4226
  source 1..120: mol_type = other DNA

SEQ ID NO: 4231 - DNA, 120 bp, synthetic construct; identical to SEQ ID NO: 4227
  source 1..120: mol_type = other DNA

SEQ ID NO: 4232 - DNA, 120 bp, synthetic construct; identical to SEQ ID NO: 4228
  source 1..120: mol_type = other DNA

SEQ ID NO: 4233 - DNA, 120 bp, synthetic construct
  source 1..120: mol_type = other DNA
actttcatctacttccaaatcaaaaaaactaaatttttaataacctcctaaatattcttaacctaaattccccaaatcataatactcttaactttcaaccttactattaaaaaatacatc

SEQ ID NO: 4234 - DNA, 120 bp, synthetic construct
  source 1..120: mol_type = other DNA
gtttttatttatttttaaattgaaaagattagatttttggtaattttttgaatatttttagtttgaattttttaaattatagtatttttagtttttagttttattgttaaaagatatatt

SEQ ID NO: 4235 - DNA, 120 bp, synthetic construct
  source 1..120: mol_type = other DNA
catctacttccaaatcaaaaaaactaaatttttaataacctcctaaatattcttaaccataataacctaaattccccaaatcataatactcttaactttcaaccttactattaaaaaata

SEQ ID NO: 4236 - DNA, 120 bp, synthetic construct
  source 1..120: mol_type = other DNA
tatttatttttaaattgaaaagattagatttttggtaattttttgaatatttttagttataataatttgaattttttaaattatagtatttttagtttttagttttattgttaaaagata

SEQ ID NO: 4237 - DNA, 120 bp, synthetic construct
  source 1..120: mol_type = other DNA
actttcatctacttccaaatcgaaaaaactaaatttttaataacctcctaaatattcttaacctaaattccccaaatcataatactcttaactttcaaccttactattaaaaaatacatc

SEQ ID NO: 4238 - DNA, 120 bp, synthetic construct
  source 1..120: mol_type = other DNA
gtttttatttatttttaaatcgaaaagattagatttttggtaattttttgaatatttttagtttgaattttttaaattatagtatttttagtttttagttttattgttaaaagatatatt

SEQ ID NO: 4239 - DNA, 120 bp, synthetic construct
  source 1..120: mol_type = other DNA
catctacttccaaatcgaaaaaactaaatttttaataacctcctaaatattcttaaccataataacctaaattccccaaatcataatactcttaactttcaaccttactattaaaaaata

SEQ ID NO: 4240 - DNA, 120 bp, synthetic construct
  source 1..120: mol_type = other DNA
tatttatttttaaatcgaaaagattagatttttggtaattttttgaatatttttagttataataatttgaattttttaaattatagtatttttagtttttagttttattgttaaaagata

SEQ ID NO: 4241 - DNA, 120 bp, synthetic construct
  source 1..120: mol_type = other DNA
ctttctacctttcacaaatatttttctaaaatccaataaaattaaaaaaaaacttattaaccttctcaaacttcacatatttacaaacaaataatatatttctctcacatttcacctaaa

SEQ ID NO: 4242 - DNA, 120 bp, synthetic construct
  source 1..120: mol_type = other DNA
ttttttattttttataaatatttttttagagtttaataaagttaagaggaaatttgttaatttttttgggttttatatgtttataaatggatgatgtattttttttgtattttatttaag

SEQ ID NO: 4243 - DNA, 120 bp, synthetic construct
  source 1..120: mol_type = other DNA
ctacctttcacaaatatttttctaaaatccaataaaattaaaaaaaaacttattaacctaaaaacttctcaaacttcacatatttacaaacaaataatatatttctctcacatttcacct

SEQ ID NO: 4244 - DNA, 120 bp, synthetic construct
  source 1..120: mol_type = other DNA
ttattttttataaatatttttttagagtttaataaagttaagaggaaatttgttaatttggagattttttgggttttatatgtttataaatggatgatgtattttttttgtattttattt

SEQ ID NO: 4245 - DNA, 120 bp, synthetic construct
  source 1..120: mol_type = other DNA
ctttctacctttcacaaatatttttctaaaatccaataaaattaaaaaaaaacttattaaccttctcgaacttcacatatttacaaacgaataatatatttctctcgcatttcacctaaa

SEQ ID NO: 4246 - DNA, 120 bp, synthetic construct
  source 1..120: mol_type = other DNA
ttttttattttttataaatatttttttagagtttaataaagttaagaggaaatttgttaattttttcgggttttatatgtttataaacggatgatgtatttttttcgtattttatttaag

SEQ ID NO: 4247 - DNA, 120 bp, synthetic construct
  source 1..120: mol_type = other DNA
ctacctttcacaaatatttttctaaaatccaataaaattaaaaaaaaacttattaacctaaaaacttctcgaacttcacatatttacaaacgaataatatatttctctcgcatttcacct

SEQ ID NO: 4248 - DNA, 120 bp, synthetic construct
  source 1..120: mol_type = other DNA
ttattttttataaatatttttttagagtttaataaagttaagaggaaatttgttaatttggagatttttcgggttttatatgtttataaacggatgatgtatttttttcgtattttattt

SEQ ID NO: 4249 - DNA, 120 bp, synthetic construct
  source 1..120: mol_type = other DNA
ctactatatttcaacaacctctttactattattaactattttttactaaatcactatcctctatacaaccaaatcacatataaacctaatttaaacttaaaacaattaaataacaaaata

SEQ ID NO: 4250 - DNA, 120 bp, synthetic construct
  source 1..120: mol_type = other DNA
ttgttgtgttttaatagtttttttgttattattgattattttttgttaggttattattttttgtataattaagttatatgtaaatttgatttggatttaaagtaattgggtggtgaaata

SEQ ID NO: 4251 - DNA, 120 bp, synthetic construct
  source 1..120: mol_type = other DNA
ctactactatatttcaacaacctctttactattattaactattttttactaaatcactatccaaccaaatcacatataaacctaatttaaacttaaaacaattaaataacaaaataaata

SEQ ID NO: 4252 - DNA, 120 bp, synthetic construct
  source 1..120: mol_type = other DNA
ttgttgttgtgttttaatagtttttttgttattattgattattttttgttaggttattatttaattaagttatatgtaaatttgatttggatttaaagtaattgggtggtgaaataaata

SEQ ID NO: 4253 - DNA, 120 bp, synthetic construct
  source 1..120: mol_type = other DNA
ctactatatttcaacaacctctttactattattaactattttttactaaatcactatcctctatacaaccaaatcacatataaacctaatttaaacttaaaacaattaaataacgaaata

SEQ ID NO: 4254 - DNA, 120 bp, synthetic construct
  source 1..120: mol_type = other DNA
ttgttgtgttttaatagtttttttgttattattgattattttttgttaggttattattttttgtataattaagttatatgtaaatttgatttggatttaaagtaattgggtggcgaaata

SEQ ID NO: 4255 - DNA, 120 bp, synthetic construct
  source 1..120: mol_type = other DNA
ctactactatatttcaacaacctctttactattattaactattttttactaaatcactatccaaccaaatcacatataaacctaatttaaacttaaaacaattaaataacgaaataaata

SEQ ID NO: 4256 - DNA, 120 bp, synthetic construct
  source 1..120: mol_type = other DNA
ttgttgttgtgttttaatagtttttttgttattattgattattttttgttaggttattatttaattaagttatatgtaaatttgatttggatttaaagtaattgggtggcgaaataaata

SEQ ID NO: 4257 - DNA, 120 bp, synthetic construct
  source 1..120: mol_type = other DNA
tcaatatataactaatatactttaatatttcaaaaacaattctaaaaaataacaatacaacaacaaatataaacaattcctaccctcctaaaaatttatttatttatttattatttttta

SEQ ID NO: 4258 - DNA, 120 bp, synthetic construct
  source 1..120: mol_type = other DNA
ttaatatataattagtgtgttttgatattttaaggataattttaggaaatagtgatatagtagtgaatatagatagtttttgtttttttgggaatttatttatttatttattattttttg

SEQ ID NO: 4259 - DNA, 120 bp, synthetic construct
  source 1..120: mol_type = other DNA
ttcattcaatatataactaatatactttaatatttcaaaaacaattctaaaaaataacaatatataaacaattcctaccctcctaaaaatttatttatttatttattattttttaaaaca

SEQ ID NO: 4260 - DNA, 120 bp, synthetic construct
  source 1..120: mol_type = other DNA
tttatttaatatataattagtgtgttttgatattttaaggataattttaggaaatagtgatatatagatagtttttgtttttttgggaatttatttatttatttattattttttgaaata

SEQ ID NO: 4261 - DNA, 120 bp, synthetic construct
  source 1..120: mol_type = other DNA
tcaatatataactaatatactttaatatttcaaaaacaattctaaaaaataacgatacaacaacgaatataaacaattcctaccctcctaaaaatttatttatttatttattatttttta

SEQ ID NO: 4262 - DNA, 120 bp, synthetic construct
  source 1..120: mol_type = other DNA
ttaatatataattagtgtgttttgatattttaaggataattttaggaaatagcgatatagtagcgaatatagatagtttttgtttttttgggaatttatttatttatttattattttttg

SEQ ID NO: 4263 - DNA, 120 bp, synthetic construct
  source 1..120: mol_type = other DNA
ttcattcaatatataactaatatactttaatatttcaaaaacaattctaaaaaataacgatatataaacaattcctaccctcctaaaaatttatttatttatttattattttttaaaaca

SEQ ID NO: 4264 - DNA, 120 bp, synthetic construct
  source 1..120: mol_type = other DNA
tttatttaatatataattagtgtgttttgatattttaaggataattttaggaaatagcgatatatagatagtttttgtttttttgggaatttatttatttatttattattttttgaaata

SEQ ID NO: 4265 - DNA, 120 bp, synthetic construct
  source 1..120: mol_type = other DNA
ccacaacaaattaactcaatcaaaaaccttcatttaaaaatatattaaaaaataaaataaatacccaataactatctttttaataaaaaaaaaaatacatttcaaaaacttaaaaaacaa

SEQ ID NO: 4266 - DNA, 120 bp, synthetic construct
  source 1..120: mol_type = other DNA
ttatagtaaattgatttaattaggaatttttatttgaaggtgtgttagaggatggggtaaatatttgatagttgtttttttggtgaaagaaaaggtgtattttaagaatttggggggtag

SEQ ID NO: 4267 - DNA, 120 bp, synthetic construct
  source 1..120: mol_type = other DNA
catccacaacaaattaactcaatcaaaaaccttcatttaaaaatatattaaaaaataaaatcaataactatctttttaataaaaaaaaaaatacatttcaaaaacttaaaaaacaaaaaa

SEQ ID NO: 4268 - DNA, 120 bp, synthetic construct
  source 1..120: mol_type = other DNA
tatttatagtaaattgatttaattaggaatttttatttgaaggtgtgttagaggatggggttgatagttgtttttttggtgaaagaaaaggtgtattttaagaatttggggggtaggagg

SEQ ID NO: 4269 - DNA, 120 bp, synthetic construct
  source 1..120: mol_type = other DNA
ccacaacaaattaactcaatcaaaaaccttcatttaaaaatatattaaaaaataaaataaatacccgataactatctttttaataaaaaaaaaaatacatttcaaaaacttaaaaaacaa

SEQ ID NO: 4270 - DNA, 120 bp, synthetic construct
  source 1..120: mol_type = other DNA
ttatagtaaattgatttaattaggaatttttatttgaaggtgtgttagaggatggggtaaatattcgatagttgtttttttggtgaaagaaaaggtgtattttaagaatttggggggtag

SEQ ID NO: 4271 - DNA, 120 bp, synthetic construct
  source 1..120: mol_type = other DNA
catccacaacaaattaactcaatcaaaaaccttcatttaaaaatatattaaaaaataaaatcgataactatctttttaataaaaaaaaaaatacatttcaaaaacttaaaaaacaaaaaa

SEQ ID NO: 4272 - DNA, 120 bp, synthetic construct
  source 1..120: mol_type = other DNA
tatttatagtaaattgatttaattaggaatttttatttgaaggtgtgttagaggatggggtcgatagttgtttttttggtgaaagaaaaggtgtattttaagaatttggggggtaggagg

SEQ ID NO: 4273 - DNA, 120 bp, synthetic construct
  source 1..120: mol_type = other DNA
taaactacaatactaataacttttaaattctattaaaaccattcctaaatataaccctattactcactaaaaaataattacaaaataattaatcaaaataattaaataacaaataatata

SEQ ID NO: 4274 - DNA, 120 bp, synthetic construct
  source 1..120: mol_type = other DNA
taaattataatattgataatttttaaattttattaaaattatttttgagtgtggttttattatttattaaggaatggttgtagggtagttgattaaggtaattagatggtaagtgatatg

SEQ ID NO: 4275 - DNA, 120 bp, synthetic construct
  source 1..120: mol_type = other DNA
acaattaaactacaatactaataacttttaaattctattaaaaccattcctaaatataaccctaaaaaataattacaaaataattaatcaaaataattaaataacaaataatataatcta

SEQ ID NO: 4276 - DNA, 120 bp, synthetic construct
  source 1..120: mol_type = other DNA
ataattaaattataatattgataatttttaaattttattaaaattatttttgagtgtggttttaaggaatggttgtagggtagttgattaaggtaattagatggtaagtgatatggtttg

SEQ ID NO: 4277 - DNA, 120 bp, synthetic construct; identical to SEQ ID NO: 4273
  source 1..120: mol_type = other DNA

SEQ ID NO: 4278 - DNA, 120 bp, synthetic construct; identical to SEQ ID NO: 4274
  source 1..120: mol_type = other DNA

SEQ ID NO: 4279 - DNA, 120 bp, synthetic construct; identical to SEQ ID NO: 4275
  source 1..120: mol_type = other DNA

SEQ ID NO: 4280 - DNA, 120 bp, synthetic construct; identical to SEQ ID NO: 4276
  source 1..120: mol_type = other DNA

SEQ ID NO: 4281 - DNA, 120 bp, synthetic construct
  source 1..120: mol_type = other DNA
caaaaaatatataaaataaaaaaccaacaaataatttaaattttatatcaactaataaccataaaatcaaaaatttaaatattatccactcattaaaaaatattttataatctcctaaaa

SEQ ID NO: 4282 - DNA, 120 bp, synthetic construct
  source 1..120: mol_type = other DNA
taggaaatatatgaaatagggaattaatagatagtttaaattttatgttagttagtgattataggattaggaatttgaatattatttatttattgggggatgttttgtgattttttggaa

SEQ ID NO: 4283 - DNA, 120 bp, synthetic construct
  source 1..120: mol_type = other DNA
aatatataaaataaaaaaccaacaaataatttaaattttatatcaactaataaccataataattcctaaaatcaaaaatttaaatattatccactcattaaaaaatattttataatctcc

SEQ ID NO: 4284 - DNA, 120 bp, synthetic construct
  source 1..120: mol_type = other DNA
aatatatgaaatagggaattaatagatagtttaaattttatgttagttagtgattatagtgatttttaggattaggaatttgaatattatttatttattgggggatgttttgtgattttt

SEQ ID NO: 4285 - DNA, 120 bp, synthetic construct; identical to SEQ ID NO: 4281
  source 1..120: mol_type = other DNA

SEQ ID NO: 4286 - DNA, 120 bp, synthetic construct; identical to SEQ ID NO: 4282
  source 1..120: mol_type = other DNA

SEQ ID NO: 4287 - DNA, 120 bp, synthetic construct; identical to SEQ ID NO: 4283
  source 1..120: mol_type = other DNA

SEQ ID NO: 4288 - DNA, 120 bp, synthetic construct; identical to SEQ ID NO: 4284
  source 1..120: mol_type = other DNA

SEQ ID NO: 4289 - DNA, 120 bp, synthetic construct
  source 1..120: mol_type = other DNA
ctaatctccacatcctaaaatcccataatattcttacaaaaactaaaaataaaactcctcaataatctacctttccctaacctttttcccaaattaaccctaccaaccctacatccccta

SEQ ID NO: 4290 - DNA, 120 bp, synthetic construct
  source 1..120: mol_type = other DNA
ttagtttttatattttggaattttatagtatttttgtaggggttgggggtgaggttttttaatgatttatttttttttgattttttttttaagttgattttattagttttgtatttttta

SEQ ID NO: 4291 - DNA, 120 bp, synthetic construct
  source 1..120: mol_type = other DNA
atccctaatctccacatcctaaaatcccataatattcttacaaaaactaaaaataaaactcctacctttccctaacctttttcccaaattaaccctaccaaccctacatcccctataaat

SEQ ID NO: 4292 - DNA, 120 bp, synthetic construct
  source 1..120: mol_type = other DNA
gtttttagtttttatattttggaattttatagtatttttgtaggggttgggggtgaggtttttatttttttttgattttttttttaagttgattttattagttttgtattttttatgaat

SEQ ID NO: 4293 - DNA, 120 bp, synthetic construct; identical to SEQ ID NO: 4289
  source 1..120: mol_type = other DNA

SEQ ID NO: 4294 - DNA, 120 bp, synthetic construct; identical to SEQ ID NO: 4290
  source 1..120: mol_type = other DNA

SEQ ID NO: 4295 - DNA, 120 bp, synthetic construct; identical to SEQ ID NO: 4291
  source 1..120: mol_type = other DNA

SEQ ID NO: 4296 - DNA, 120 bp, synthetic construct; identical to SEQ ID NO: 4292
  source 1..120: mol_type = other DNA

SEQ ID NO: 4297 - DNA, 120 bp, synthetic construct
  source 1..120: mol_type = other DNA
tttaaactctacccctcaaaccaaacttcctatcaaaaaattaatacccaaaacaacaaaaaattctacctaaaacaaaaaaccaaacttcacaatcaaacactccccaacaaccaccat

SEQ ID NO: 4298 - DNA, 120 bp, synthetic construct
  source 1..120: mol_type = other DNA
tttgggttttgttttttagattaaattttttgttagggagttggtgtttaagatagtaagaaattttatttaaaataagagattaaattttatagttaggtattttttaataattattat

SEQ ID NO: 4299 - DNA, 120 bp, synthetic construct
  source 1..120: mol_type = other DNA
aactctacccctcaaaccaaacttcctatcaaaaaattaatacccaaaacaacaaaaaacatttaattctacctaaaacaaaaaaccaaacttcacaatcaaacactccccaacaaccac

SEQ ID NO: 4300 - DNA, 120 bp, synthetic construct
  source 1..120: mol_type = other DNA
ggttttgttttttagattaaattttttgttagggagttggtgtttaagatagtaagaaatatttaattttatttaaaataagagattaaattttatagttaggtattttttaataattat

SEQ ID NO: 4301 - DNA, 120 bp, synthetic construct; identical to SEQ ID NO: 4297
  source 1..120: mol_type = other DNA

SEQ ID NO: 4302 - DNA, 120 bp, synthetic construct; identical to SEQ ID NO: 4298
  source 1..120: mol_type = other DNA

SEQ ID NO: 4303 - DNA, 120 bp, synthetic construct; identical to SEQ ID NO: 4299
  source 1..120: mol_type = other DNA

SEQ ID NO: 4304 - DNA, 120 bp, synthetic construct; identical to SEQ ID NO: 4300
  source 1..120: mol_type = other DNA

SEQ ID NO: 4305 - DNA, 120 bp, synthetic construct
  source 1..120: mol_type = other DNA
taatcaaattattccttcaaccaaactataaaactatcttccatttcattacctattaatataaaataatttaaaaaaaaaatataaaaaaaaaattaaaaaataaattcaaaaacaact

SEQ ID NO: 4306 - DNA, 120 bp, synthetic construct
  source 1..120: mol_type = other DNA
tgattaaattgtttttttaattaggttataaagttgttttttattttattgtttattaatgtggagtaatttgagaaaagggtataggaagagaattgaaaagtaagtttaaaaatagtt

SEQ ID NO: 4307 - DNA, 120 bp, synthetic construct
  source 1..120: mol_type = other DNA
tatattaatcaaattattccttcaaccaaactataaaactatcttccatttcattacctattaatttaaaaaaaaaatataaaaaaaaaattaaaaaataaattcaaaaacaactttcta

SEQ ID NO: 4308 - DNA, 120 bp, synthetic construct
  source 1..120: mol_type = other DNA
tatattgattaaattgtttttttaattaggttataaagttgttttttattttattgtttattaatttgagaaaagggtataggaagagaattgaaaagtaagtttaaaaatagttttttg

SEQ ID NO: 4309 - DNA, 120 bp, synthetic construct; identical to SEQ ID NO: 4305
  source 1..120: mol_type = other DNA

SEQ ID NO: 4310 - DNA, 120 bp, synthetic construct; identical to SEQ ID NO: 4306
  source 1..120: mol_type = other DNA

SEQ ID NO: 4311 - DNA, 120 bp, synthetic construct; identical to SEQ ID NO: 4307
  source 1..120: mol_type = other DNA

SEQ ID NO: 4312 - DNA, 120 bp, synthetic construct; identical to SEQ ID NO: 4308
  source 1..120: mol_type = other DNA

SEQ ID NO: 4313 - DNA, 120 bp, synthetic construct
  source 1..120: mol_type = other DNA
ctatattctaattcttcaactaccaaaacataataattattaacaacccaacacaacaaacatcttaaaaaatataaaactcaaaataactttataattaaccccttaatcaataatatc

SEQ ID NO: 4314 - DNA, 120 bp, synthetic construct
  source 1..120: mol_type = other DNA
ttatattttagttttttagttgttaaaatatgataattattagtagtttagtataataaatattttgggaaatgtgggatttagaatagttttgtaattggttttttagttaatgatgtt

SEQ ID NO: 4315 - DNA, 120 bp, synthetic construct
  source 1..120: mol_type = other DNA
ttctaattcttcaactaccaaaacataataattattaacaacccaacacaacaaactaccctaatatcttaaaaaatataaaactcaaaataactttataattaaccccttaatcaataa

SEQ ID NO: 4316 - DNA, 120 bp, synthetic construct
  source 1..120: mol_type = other DNA
ttttagttttttagttgttaaaatatgataattattagtagtttagtataataaattgttttgatattttgggaaatgtgggatttagaatagttttgtaattggttttttagttaatga

SEQ ID NO: 4317 - DNA, 120 bp, synthetic construct; identical to SEQ ID NO: 4313
  source 1..120: mol_type = other DNA

SEQ ID NO: 4318 - DNA, 120 bp, synthetic construct; identical to SEQ ID NO: 4314
  source 1..120: mol_type = other DNA

SEQ ID NO: 4319 - DNA, 120 bp, synthetic construct; identical to SEQ ID NO: 4315
  source 1..120: mol_type = other DNA

SEQ ID NO: 4320 - DNA, 120 bp, synthetic construct; identical to SEQ ID NO: 4316
  source 1..120: mol_type = other DNA

SEQ ID NO: 4321 - DNA, 120 bp, synthetic construct
  source 1..120: mol_type = other DNA
atcacaaacatactctttcttccatctacctccttcctaataaatctaacaaattccacttaacttacatatcacctcctccaaaaaaccctctctacttacccccaaaaaaattcattc

SEQ ID NO: 4322 - DNA, 120 bp, synthetic construct
  source 1..120: mol_type = other DNA
gttatgggtatgtttttttttttgtttgttttttttttgatgggtttggtaaattttgtttagtttgtgtgttattttttttaagaagttttttttgtttgtttttgggagaatttattt

SEQ ID NO: 4323 - DNA, 120 bp, synthetic construct
  source 1..120: mol_type = other DNA
aaacatactctttcttccatctacctccttcctaataaatctaacaaattccacttatcatatcccaacttacatatcacctcctccaaaaaaccctctctacttacccccaaaaaaatt

SEQ ID NO: 4324 - DNA, 120 bp, synthetic construct
  source 1..120: mol_type = other DNA
gggtatgtttttttttttgtttgttttttttttgatgggtttggtaaattttgtttattatattttagtttgtgtgttattttttttaagaagttttttttgtttgtttttgggagaatt

SEQ ID NO: 4325 - DNA, 120 bp, synthetic construct
  source 1..120: mol_type = other DNA
atcacgaacatactctttcttccgtctacctccttcctaataaatctaacaaattccgcttaacttacgtatcacctcctccaaaaaaccctctctacttacccccgaaaaaattcattc

SEQ ID NO: 4326 - DNA, 120 bp, synthetic construct
  source 1..120: mol_type = other DNA
gttacgggtatgttttttttttcgtttgttttttttttgatgggtttggtaaatttcgtttagtttgcgtgttattttttttaagaagttttttttgtttgttttcgggagaatttattt

SEQ ID NO: 4327 - DNA, 120 bp, synthetic construct
  source 1..120: mol_type = other DNA
aaacatactctttcttccgtctacctccttcctaataaatctaacaaattccgcttatcatatcccaacttacgtatcacctcctccaaaaaaccctctctacttacccccgaaaaaatt

SEQ ID NO: 4328 - DNA, 120 bp, synthetic construct
  source 1..120: mol_type = other DNA
gggtatgttttttttttcgtttgttttttttttgatgggtttggtaaatttcgtttattatattttagtttgcgtgttattttttttaagaagttttttttgtttgttttcgggagaatt

SEQ ID NO: 4329 - DNA, 120 bp, synthetic construct
  source 1..120: mol_type = other DNA
ctaaatcacttataaccctctcttaaacaaaataaaacttattaataaaaaaaaaatattctaaaattctctaaataaacctaccctttaaaaaaacttctctaaaaatttcaaaaacca

SEQ ID NO: 4330 - DNA, 120 bp, synthetic construct
  source 1..120: mol_type = other DNA
ttgggttatttgtgatttttttttaagtagggtagggtttattggtggagagggggtgttttggggttttttaggtgaatttattttttaaaagggtttttttgaggattttaggaatta

SEQ ID NO: 4331 - DNA, 120 bp, synthetic construct
  source 1..120: mol_type = other DNA
ctccctaaatcacttataaccctctcttaaacaaaataaaacttattaataaaaaaaaaatattctctaaataaacctaccctttaaaaaaacttctctaaaaatttcaaaaaccaaatc

SEQ ID NO: 4332 - DNA, 120 bp, synthetic construct
  source 1..120: mol_type = other DNA
ttttttgggttatttgtgatttttttttaagtagggtagggtttattggtggagagggggtgttttttaggtgaatttattttttaaaagggtttttttgaggattttaggaattaagtt

SEQ ID NO: 4333 - DNA, 120 bp, synthetic construct; identical to SEQ ID NO: 4329
  source 1..120: mol_type = other DNA

SEQ ID NO: 4334 - DNA, 120 bp, synthetic construct; identical to SEQ ID NO: 4330
  source 1..120: mol_type = other DNA

SEQ ID NO: 4335 - DNA, 120 bp, synthetic construct; identical to SEQ ID NO: 4331
  source 1..120: mol_type = other DNA

SEQ ID NO: 4336 - DNA, 120 bp, synthetic construct; identical to SEQ ID NO: 4332
  source 1..120: mol_type = other DNA

SEQ ID NO: 4337 - DNA, 120 bp, synthetic construct
  source 1..120: mol_type = other DNA
ttcaaaaaataaactaaaatataaaaaaactacataacttaccctaaatattataactaataacttaaaaatctaaaatttaacataaaccctaataatctaacttcaaaacccatattt

SEQ ID NO: 4338 - DNA, 120 bp, synthetic construct
  source 1..120: mol_type = other DNA
tttaaggggtaaattgaagtatggaggggttatataatttgttttaggtgttatagttagtaatttggaggtttgggatttgatgtgaattttggtagtttggttttagggtttatgttt

SEQ ID NO: 4339 - DNA, 120 bp, synthetic construct
  source 1..120: mol_type = other DNA
atcattcaaaaaataaactaaaatataaaaaaactacataacttaccctaaatattataactaaaaatctaaaatttaacataaaccctaataatctaacttcaaaacccatatttcccc

SEQ ID NO: 4340 - DNA, 120 bp, synthetic construct
  source 1..120: mol_type = other DNA
attatttaaggggtaaattgaagtatggaggggttatataatttgttttaggtgttatagttggaggtttgggatttgatgtgaattttggtagtttggttttagggtttatgttttttt

SEQ ID NO: 4341 - DNA, 120 bp, synthetic construct
  source 1..120: mol_type = other DNA
ttcaaaaaataaactaaaatataaaaaaactacataacttaccctaaatattataactaataacttaaaaatctaaaatttaacgtaaaccctaataatctaacttcaaaacccatattt

SEQ ID NO: 4342 - DNA, 120 bp, synthetic construct
  source 1..120: mol_type = other DNA
tttaaggggtaaattgaagtatggaggggttatataatttgttttaggtgttatagttagtaatttggaggtttgggatttgacgtgaattttggtagtttggttttagggtttatgttt

SEQ ID NO: 4343 - DNA, 120 bp, synthetic construct
  source 1..120: mol_type = other DNA
atcattcaaaaaataaactaaaatataaaaaaactacataacttaccctaaatattataactaaaaatctaaaatttaacgtaaaccctaataatctaacttcaaaacccatatttcccc

SEQ ID NO: 4344 - DNA, 120 bp, synthetic construct
  source 1..120: mol_type = other DNA
attatttaaggggtaaattgaagtatggaggggttatataatttgttttaggtgttatagttggaggtttgggatttgacgtgaattttggtagtttggttttagggtttatgttttttt

SEQ ID NO: 4345 - DNA, 120 bp, synthetic construct
  source 1..120: mol_type = other DNA
ttaaaaactcataacaactattaatttttaattttaaaaataacaatttaaaataattcactacaaattttattcacttataaacctttattattaatactacattacaattaacctaaa

SEQ ID NO: 4346 - DNA, 120 bp, synthetic construct
  source 1..120: mol_type = other DNA
ttaaaagtttatgataattgttaatttttagttttgaaaatagtaatttgaagtaatttattataagttttatttatttgtaagtttttattattaatgttatattatagttggtttgaa

SEQ ID NO: 4347 - DNA, 120 bp, synthetic construct
  source 1..120: mol_type = other DNA
aaaattaaaaactcataacaactattaatttttaattttaaaaataacaatttaaaataataattttattcacttataaacctttattattaatactacattacaattaacctaaaaaat

SEQ ID NO: 4348 - DNA, 120 bp, synthetic construct
  source 1..120: mol_type = other DNA
aaaattaaaagtttatgataattgttaatttttagttttgaaaatagtaatttgaagtaatagttttatttatttgtaagtttttattattaatgttatattatagttggtttgaaaaat

SEQ ID NO: 4349 - DNA, 120 bp, synthetic construct; identical to SEQ ID NO: 4345
  source 1..120: mol_type = other DNA

SEQ ID NO: 4350 - DNA, 120 bp, synthetic construct; identical to SEQ ID NO: 4346
  source 1..120: mol_type = other DNA

SEQ ID NO: 4351 - DNA, 120 bp, synthetic construct; identical to SEQ ID NO: 4347
  source 1..120: mol_type = other DNA

SEQ ID NO: 4352 - DNA, 120 bp, synthetic construct; identical to SEQ ID NO: 4348
  source 1..120: mol_type = other DNA

SEQ ID NO: 4353 - DNA, 120 bp, synthetic construct
  source 1..120: mol_type = other DNA
cttcatcatataacaaaattaaataatcatacaatatcaatatcatataacataaaaaaacaatatctcttcaaaaataaaaaataactaatatacatcacataaataaatataaacata

SEQ ID NO: 4354 - DNA, 120 bp, synthetic construct
  source 1..120: mol_type = other DNA
ttttattatataatagagttggatagttatataatattaatgttatataatatgagaaagtagtgtttttttaaaagtaaggaatgattaatgtgtattatgtgaatagatgtgggtatg

SEQ ID NO: 4355 - DNA, 120 bp, synthetic construct
  source 1..120: mol_type = other DNA
tcatataacaaaattaaataatcatacaatatcaatatcatataacataaaaaaacatattttaaaatatctcttcaaaaataaaaaataactaatatacatcacataaataaatataaa

SEQ ID NO: 4356 - DNA, 120 bp, synthetic construct
  source 1..120: mol_type = other DNA
ttatataatagagttggatagttatataatattaatgttatataatatgagaaagtatgttttgaagtgtttttttaaaagtaaggaatgattaatgtgtattatgtgaatagatgtggg

SEQ ID NO: 4357 - DNA, 120 bp, synthetic construct
  source 1..120: mol_type = other DNA
cttcatcatataacaaaattaaataatcatacaatatcaatatcatataacataaaaaaacaatatctcttcaaaaataaaaaataactaatatacatcacgtaaataaatataaacata

SEQ ID NO: 4358 - DNA, 120 bp, synthetic construct
  source 1..120: mol_type = other DNA
ttttattatataatagagttggatagttatataatattaatgttatataatatgagaaagtagtgtttttttaaaagtaaggaatgattaatgtgtattacgtgaatagatgtgggtatg

SEQ ID NO: 4359 - DNA, 120 bp, synthetic construct
  source 1..120: mol_type = other DNA
tcatataacaaaattaaataatcatacaatatcaatatcatataacataaaaaaacatattttaaaatatctcttcaaaaataaaaaataactaatatacatcacgtaaataaatataaa

SEQ ID NO: 4360 - DNA, 120 bp, synthetic construct
  source 1..120: mol_type = other DNA
ttatataatagagttggatagttatataatattaatgttatataatatgagaaagtatgttttgaagtgtttttttaaaagtaaggaatgattaatgtgtattacgtgaatagatgtggg

SEQ ID NO: 4361 - DNA, 120 bp, synthetic construct
  source 1..120: mol_type = other DNA
acaataccaaaacttcatctcaaaaaaaaaaaaaattcaactacctacaaaaaaaacataattcttcaaatatataaataacatattaaaataaataaaaacaacactacttcctaccta

SEQ ID NO: 4362 - DNA, 120 bp, synthetic construct
  source 1..120: mol_type = other DNA
ataatattaagattttgttttaaaaaaaaaaaaaatttagttgtttatagaaagaatataattttttaaatgtatgaataatatattaaaataaataaaaatagtattgttttttatttg

SEQ ID NO: 4363 - DNA, 120 bp, synthetic construct
  source 1..120: mol_type = other DNA
aaaaacaataccaaaacttcatctcaaaaaaaaaaaaaattcaactacctacaaaaaaaaccaaatatataaataacatattaaaataaataaaaacaacactacttcctacctattcaa

SEQ ID NO: 4364 - DNA, 120 bp, synthetic construct
  source 1..120: mol_type = other DNA
ggggataatattaagattttgttttaaaaaaaaaaaaaatttagttgtttatagaaagaattaaatgtatgaataatatattaaaataaataaaaatagtattgttttttatttgtttaa

SEQ ID NO: 4365 - DNA, 120 bp, synthetic construct
  source 1..120: mol_type = other DNA
acaataccaaaacttcgtctcaaaaaaaaaaaaaattcaactacctacaaaaaaaacataattcttcaaatatataaataacatattaaaataaataaaaacaacactacttcctaccta

SEQ ID NO: 4366 - DNA, 120 bp, synthetic construct
  source 1..120: mol_type = other DNA
ataatattaagatttcgttttaaaaaaaaaaaaaatttagttgtttatagaaagaatataattttttaaatgtatgaataatatattaaaataaataaaaatagtattgttttttatttg

SEQ ID NO: 4367 - DNA, 120 bp, synthetic construct
  source 1..120: mol_type = other DNA
aaaaacaataccaaaacttcgtctcaaaaaaaaaaaaaattcaactacctacaaaaaaaaccaaatatataaataacatattaaaataaataaaaacaacactacttcctacctattcaa

SEQ ID NO: 4368 - DNA, 120 bp, synthetic construct
  source 1..120: mol_type = other DNA
ggggataatattaagatttcgttttaaaaaaaaaaaaaatttagttgtttatagaaagaattaaatgtatgaataatatattaaaataaataaaaatagtattgttttttatttgtttaa

SEQ ID NO: 4369 - DNA, 120 bp, synthetic construct
  source 1..120: mol_type = other DNA
taacaaaacacataaacctcaaaaaaacattaaacttaatcattaccccaaaaactataaaattactaattaactaatacattctatcaaaaccacataaatccaaactaattaaaatac

SEQ ID NO: 4370 - DNA, 120 bp, synthetic construct
  source 1..120: mol_type = other DNA
taatagaatatgtggattttaaaagaatattgaatttaattattgttttaaaggttataaaattgttaattaattgatatattttattagaattatgtaagtttgagttaattaaaatgt

SEQ ID NO: 4371 - DNA, 120 bp, synthetic construct
  source 1..120: mol_type = other DNA
aaacacataaacctcaaaaaaacattaaacttaatcattaccccaaaaactataaaatattttaatattactaattaactaatacattctatcaaaaccacataaatccaaactaattaa

SEQ ID NO: 4372 - DNA, 120 bp, synthetic construct
  source 1..120: mol_type = other DNA
gaatatgtggattttaaaagaatattgaatttaattattgttttaaaggttataaaatattttaatattgttaattaattgatatattttattagaattatgtaagtttgagttaattaa

SEQ ID NO: 4373 - DNA, 120 bp, synthetic construct
  source 1..120: mol_type = other DNA
taacaaaacacgtaaacctcaaaaaaacattaaacttaatcattaccccaaaaactataaaattactaattaactaatacattctatcaaaaccacgtaaatccgaactaattaaaatac

SEQ ID NO: 4374 - DNA, 120 bp, synthetic construct
  source 1..120: mol_type = other DNA
taatagaatacgtggattttaaaagaatattgaatttaattattgttttaaaggttataaaattgttaattaattgatatattttattagaattacgtaagttcgagttaattaaaatgt

SEQ ID NO: 4375 - DNA, 120 bp, synthetic construct
  source 1..120: mol_type = other DNA
aaacacgtaaacctcaaaaaaacattaaacttaatcattaccccaaaaactataaaatattttaatattactaattaactaatacattctatcaaaaccacgtaaatccgaactaattaa

SEQ ID NO: 4376 - DNA, 120 bp, synthetic construct
  source 1..120: mol_type = other DNA
gaatacgtggattttaaaagaatattgaatttaattattgttttaaaggttataaaatattttaatattgttaattaattgatatattttattagaattacgtaagttcgagttaattaa

SEQ ID NO: 4377 - DNA, 120 bp, synthetic construct
  source 1..120: mol_type = other DNA
ccccatacctataacaatcaaaactccatttaccaccaaaaataaactttcattaccatctaatccaactccaaaatcccattttaaaatctacttcctcatcccactactaacatcaac

SEQ ID NO: 4378 - DNA, 120 bp, synthetic construct
  source 1..120: mol_type = other DNA
ttttatgtttgtagtaattaggattttatttattattaggaatgggtttttattattatttgatttagttttaaaattttattttaaaatttgtttttttattttattgttggtattaat

SEQ ID NO: 4379 - DNA, 120 bp, synthetic construct
  source 1..120: mol_type = other DNA
tacctataacaatcaaaactccatttaccaccaaaaataaactttcattaccatctaactaaaaaaaatccaactccaaaatcccattttaaaatctacttcctcatcccactactaaca

SEQ ID NO: 4380 - DNA, 120 bp, synthetic construct
  source 1..120: mol_type = other DNA
tgtttgtagtaattaggattttatttattattaggaatgggtttttattattatttgattaggggggatttagttttaaaattttattttaaaatttgtttttttattttattgttggta

SEQ ID NO: 4381 - DNA, 120 bp, synthetic construct; identical to SEQ ID NO: 4377
  source 1..120: mol_type = other DNA

SEQ ID NO: 4382 - DNA, 120 bp, synthetic construct; identical to SEQ ID NO: 4378
  source 1..120: mol_type = other DNA

SEQ ID NO: 4383 - DNA, 120 bp, synthetic construct; identical to SEQ ID NO: 4379
  source 1..120: mol_type = other DNA

SEQ ID NO: 4384 - DNA, 120 bp, synthetic construct; identical to SEQ ID NO: 4380
  source 1..120: mol_type = other DNA

SEQ ID NO: 4385 - DNA, 120 bp, synthetic construct
  source 1..120: mol_type = other DNA
taaaaataattattaaccataatatatacacaatcaaaataaacacattacttaaaaaatcaatctcttcaaaaactttaaaaacactacaccaaacccaaactctaaatattatataaa

SEQ ID NO: 4386 - DNA, 120 bp, synthetic construct
  source 1..120: mol_type = other DNA
taaaggtaattattaattatggtatgtatatagttgaggtgaatatattgtttgagggattaatttttttaaggattttaaaagtattgtattgggtttaagttttagatgttgtataga

SEQ ID NO: 4387 - DNA, 120 bp, synthetic construct
  source 1..120: mol_type = other DNA
aataattattaaccataatatatacacaatcaaaataaacacattacttaaaaaatcaatataaaaatctcttcaaaaactttaaaaacactacaccaaacccaaactctaaatattata

SEQ ID NO: 4388 - DNA, 120 bp, synthetic construct
  source 1..120: mol_type = other DNA
ggtaattattaattatggtatgtatatagttgaggtgaatatattgtttgagggattaatgtaggaatttttttaaggattttaaaagtattgtattgggtttaagttttagatgttgta

SEQ ID NO: 4389 - DNA, 120 bp, synthetic construct
  source 1..120: mol_type = other DNA
taaaaataattattaaccataatatatacacaatcgaaataaacacattacttaaaaaatcaatctcttcaaaaactttaaaaacactacaccgaacccaaactctaaatattatataaa

SEQ ID NO: 4390 - DNA, 120 bp, synthetic construct
  source 1..120: mol_type = other DNA
taaaggtaattattaattatggtatgtatatagtcgaggtgaatatattgtttgagggattaatttttttaaggattttaaaagtattgtatcgggtttaagttttagatgttgtataga

SEQ ID NO: 4391 - DNA, 120 bp, synthetic construct
  source 1..120: mol_type = other DNA
aataattattaaccataatatatacacaatcgaaataaacacattacttaaaaaatcaatataaaaatctcttcaaaaactttaaaaacactacaccgaacccaaactctaaatattata

SEQ ID NO: 4392 - DNA, 120 bp, synthetic construct
  source 1..120: mol_type = other DNA
ggtaattattaattatggtatgtatatagtcgaggtgaatatattgtttgagggattaatgtaggaatttttttaaggattttaaaagtattgtatcgggtttaagttttagatgttgta

SEQ ID NO: 4393 - DNA, 120 bp, synthetic construct
  source 1..120: mol_type = other DNA
tatctctaaactataaaacaaaacaaaacaaaaccaaaacaaaatatctaaaaaaacaaaactcataatcttccaacaaaacatcaaaaaatttctaaaatttaaaaccaaaaaaaacct

SEQ ID NO: 4394 - DNA, 120 bp, synthetic construct
  source 1..120: mol_type = other DNA
tgtttttaggttatagagtagaataaaatagagttaagataaggtgtttggaaaaatagaatttatggttttttaatagggtattaaagggtttttaaaatttaaagttaaagggaattt

SEQ ID NO: 4395 - DNA, 120 bp, synthetic construct
  source 1..120: mol_type = other DNA
tctaaactataaaacaaaacaaaacaaaaccaaaacaaaatatctaaaaaaacaaaactccaatctcataatcttccaacaaaacatcaaaaaatttctaaaatttaaaaccaaaaaaaa

SEQ ID NO: 4396 - DNA, 120 bp, synthetic construct
  source 1..120: mol_type = other DNA
tttaggttatagagtagaataaaatagagttaagataaggtgtttggaaaaatagaattttagttttatggttttttaatagggtattaaagggtttttaaaatttaaagttaaagggaa

SEQ ID NO: 4397 - DNA, 120 bp, synthetic construct; identical to SEQ ID NO: 4393
  source 1..120: mol_type = other DNA

SEQ ID NO: 4398 - DNA, 120 bp, synthetic construct; identical to SEQ ID NO: 4394
  source 1..120: mol_type = other DNA

SEQ ID NO: 4399 - DNA, 120 bp, synthetic construct; identical to SEQ ID NO: 4395
  source 1..120: mol_type = other DNA

SEQ ID NO: 4400 - DNA, 120 bp, synthetic construct; identical to SEQ ID NO: 4396
  source 1..120: mol_type = other DNA

SEQ ID NO: 4401 - DNA, 120 bp, synthetic construct
  source 1..120: mol_type = other DNA
cctccccacctactactattaccctaattaacctcctacctcactaaataacaaaataaacaaccctaccatctacttccctccccaaaacaccaaacataaaacactaaaaatttataa

SEQ ID NO: 4402 - DNA, 120 bp, synthetic construct
  source 1..120: mol_type = other DNA
tttttttatttgttgttgttattttagttgattttttgttttattgggtggtagaatggatagttttgttatttgtttttttttttagagtattaggtatggaatattggggatttatgg

SEQ ID NO: 4403 - DNA, 120 bp, synthetic construct
  source 1..120: mol_type = other DNA
ccccacctccccacctactactattaccctaattaacctcctacctcactaaataacaaaataccatctacttccctccccaaaacaccaaacataaaacactaaaaatttataaaatca

SEQ ID NO: 4404 - DNA, 120 bp, synthetic construct
  source 1..120: mol_type = other DNA
ttttatttttttatttgttgttgttattttagttgattttttgttttattgggtggtagaatgttatttgtttttttttttagagtattaggtatggaatattggggatttatggggtta

SEQ ID NO: 4405 - DNA, 120 bp, synthetic construct; identical to SEQ ID NO: 4401
  source 1..120: mol_type = other DNA

SEQ ID NO: 4406 - DNA, 120 bp, synthetic construct; identical to SEQ ID NO: 4402
  source 1..120: mol_type = other DNA

SEQ ID NO: 4407 - DNA, 120 bp, synthetic construct; identical to SEQ ID NO: 4403
  source 1..120: mol_type = other DNA

SEQ ID NO: 4408 - DNA, 120 bp, synthetic construct; identical to SEQ ID NO: 4404
  source 1..120: mol_type = other DNA

SEQ ID NO: 4409 - DNA, 120 bp, synthetic construct
  source 1..120: mol_type = other DNA
aaaacaataactacccaaaatcaaacaaacaataaataacaaaattaaaatctaactcccaaatccctattcttcaataacattatactacctctcataatattctttttttcaataaac

SEQ ID NO: 4410 - DNA, 120 bp, synthetic construct
  source 1..120: mol_type = other DNA
aaggtagtaattgtttaaggttagataggtagtaagtggtagagttgggatttggtttttaagtttttgttttttagtaatattatgttgttttttataatgtttttttttttaataaat

SEQ ID NO: 4411 - DNA, 120 bp, synthetic construct
  source 1..120: mol_type = other DNA
aaaaaaaacaataactacccaaaatcaaacaaacaataaataacaaaattaaaatctaactctattcttcaataacattatactacctctcataatattctttttttcaataaactatat

SEQ ID NO: 4412 - DNA, 120 bp, synthetic construct
  source 1..120: mol_type = other DNA
aaagaaggtagtaattgtttaaggttagataggtagtaagtggtagagttgggatttggttttgttttttagtaatattatgttgttttttataatgtttttttttttaataaattgtgt

SEQ ID NO: 4413 - DNA, 120 bp, synthetic construct; identical to SEQ ID NO: 4409
  source 1..120: mol_type = other DNA

SEQ ID NO: 4414 - DNA, 120 bp, synthetic construct; identical to SEQ ID NO: 4410
  source 1..120: mol_type = other DNA

SEQ ID NO: 4415 - DNA, 120 bp, synthetic construct; identical to SEQ ID NO: 4411
  source 1..120: mol_type = other DNA

SEQ ID NO: 4416 - DNA, 120 bp, synthetic construct; identical to SEQ ID NO: 4412
  source 1..120: mol_type = other DNA

SEQ ID NO: 4417 - DNA, 120 bp, synthetic construct
  source 1..120: mol_type = other DNA
aatcctaactatctctacaacaacaaaaatcaaaaaaaaaaacaaactcaaaaatatcctacaaaaaaacaacaatcaaactaaatcaaaacaaaaaaaaaacaaaaccccaaaaaaccc

SEQ ID NO: 4418 - DNA, 120 bp, synthetic construct
  source 1..120: mol_type = other DNA
agttttggttgtttttgtagtagtaggggttggggagggaggtaagtttagaggtgttttatagggaagtagtagttagattggattaaggtagaaaggagatagagttttgggggattt

SEQ ID NO: 4419 - DNA, 120 bp, synthetic construct
  source 1..120: mol_type = other DNA
taactatctctacaacaacaaaaatcaaaaaaaaaaacaaactcaaaaatatcctacacaacatacaaaaaaacaacaatcaaactaaatcaaaacaaaaaaaaaacaaaaccccaaaaa

SEQ ID NO: 4420 - DNA, 120 bp, synthetic construct
  source 1..120: mol_type = other DNA
tggttgtttttgtagtagtaggggttggggagggaggtaagtttagaggtgttttatatggtatgtagggaagtagtagttagattggattaaggtagaaaggagatagagttttggggg

SEQ ID NO: 4421 - DNA, 120 bp, synthetic construct
  source 1..120: mol_type = other DNA
aatcctaactatctctacaacaacaaaaatcgaaaaaaaaaacaaactcaaaaatatcctacaaaaaaacaacaatcaaactaaatcaaaacaaaaaaaaaacaaaaccccgaaaaaccc

SEQ ID NO: 4422 - DNA, 120 bp, synthetic construct
  source 1..120: mol_type = other DNA
agttttggttgtttttgtagtagtaggggtcggggagggaggtaagtttagaggtgttttatagggaagtagtagttagattggattaaggtagaaaggagatagagtttcgggggattt

SEQ ID NO: 4423 - DNA, 120 bp, synthetic construct
  source 1..120: mol_type = other DNA
taactatctctacaacaacaaaaatcgaaaaaaaaaacaaactcaaaaatatcctacacgacatacaaaaaaacaacaatcaaactaaatcaaaacaaaaaaaaaacaaaaccccgaaaa

SEQ ID NO: 4424 - DNA, 120 bp, synthetic construct
  source 1..120: mol_type = other DNA
tggttgtttttgtagtagtaggggtcggggagggaggtaagtttagaggtgttttatacggtatgtagggaagtagtagttagattggattaaggtagaaaggagatagagtttcggggg

SEQ ID NO: 4425 - DNA, 120 bp, synthetic construct
  source 1..120: mol_type = other DNA
aaaacacaaaaccaaaaatcctattactctctacataaaaataccaaataaactactttattaccaaattttcttttttaaaaaaactttctttccattctataactctttaaaaaaaaa

SEQ ID NO: 4426 - DNA, 120 bp, synthetic construct
  source 1..120: mol_type = other DNA
ggggtatagagttagggattttgttattttttatatagaggtgttaagtaggttattttattgttaagtttttttttttaaaaaaattttttttttattttatgattttttaagggaaga

SEQ ID NO: 4427 - DNA, 120 bp, synthetic construct
  source 1..120: mol_type = other DNA
atcaaaacacaaaaccaaaaatcctattactctctacataaaaataccaaataaactacttcaaattttcttttttaaaaaaactttctttccattctataactctttaaaaaaaaaaat

SEQ ID NO: 4428 - DNA, 120 bp, synthetic construct
  source 1..120: mol_type = other DNA
attggggtatagagttagggattttgttattttttatatagaggtgttaagtaggttattttaagtttttttttttaaaaaaattttttttttattttatgattttttaagggaagaaat

SEQ ID NO: 4429 - DNA, 120 bp, synthetic construct; identical to SEQ ID NO: 4425
  source 1..120: mol_type = other DNA

SEQ ID NO: 4430 - DNA, 120 bp, synthetic construct; identical to SEQ ID NO: 4426
  source 1..120: mol_type = other DNA

SEQ ID NO: 4431 - DNA, 120 bp, synthetic construct
  source 1..120: mol_type = other DNA
atcgaaacacaaaaccaaaaatcctattactctctacataaaaataccaaataaactacttcaaattttcttttttaaaaaaactttctttccattctataactctttaaaaaaaaaaat

SEQ ID NO: 4432 - DNA, 120 bp, synthetic construct
  source 1..120: mol_type = other DNA
atcggggtatagagttagggattttgttattttttatatagaggtgttaagtaggttattttaagtttttttttttaaaaaaattttttttttattttatgattttttaagggaagaaat

SEQ ID NO: 4433 - DNA, 120 bp, synthetic construct
  source 1..120: mol_type = other DNA
ctaatatctaaaacactaccaaatacattataaacccttaataaatatattcaattaattcttaattcatatccattaactactttcctattaaataattttctaaatttattatatatt

SEQ ID NO: 4434 - DNA, 120 bp, synthetic construct
  source 1..120: mol_type = other DNA
ttagtgtttaaaatattgttgaatgtattgtaggtttttaataaatatgtttaattaatttttagtttatgtttattaattatttttttgttgaatggttttttagatttgttgtatatt

SEQ ID NO: 4435 - DNA, 120 bp, synthetic construct
  source 1..120: mol_type = other DNA
tccctaatatctaaaacactaccaaatacattataaacccttaataaatatattcaattaattcatatccattaactactttcctattaaataattttctaaatttattatatattattt

SEQ ID NO: 4436 - DNA, 120 bp, synthetic construct
  source 1..120: mol_type = other DNA
tttttagtgtttaaaatattgttgaatgtattgtaggtttttaataaatatgtttaattaatttatgtttattaattatttttttgttgaatggttttttagatttgttgtatattattt

SEQ ID NO: 4437 - DNA, 120 bp, synthetic construct
  source 1..120: mol_type = other DNA
ctaatatctaaaacactaccgaatacattataaacccttaataaatatattcaattaattcttaattcatatccattaactactttcctattaaataattttctaaatttattatatatt

SEQ ID NO: 4438 - DNA, 120 bp, synthetic construct
  source 1..120: mol_type = other DNA
ttagtgtttaaaatattgtcgaatgtattgtaggtttttaataaatatgtttaattaatttttagtttatgtttattaattatttttttgttgaatggttttttagatttgttgtatatt

SEQ ID NO: 4439 - DNA, 120 bp, synthetic construct
  source 1..120: mol_type = other DNA
tccctaatatctaaaacactaccgaatacattataaacccttaataaatatattcaattaattcatatccattaactactttcctattaaataattttctaaatttattatatattattt

SEQ ID NO: 4440 - DNA, 120 bp, synthetic construct
  source 1..120: mol_type = other DNA
tttttagtgtttaaaatattgtcgaatgtattgtaggtttttaataaatatgtttaattaatttatgtttattaattatttttttgttgaatggttttttagatttgttgtatattattt

SEQ ID NO: 4441 - DNA, 120 bp, synthetic construct
  source 1..120: mol_type = other DNA
aaatactaactccctcatacttcctaacttctaaacatcaatataactaaacaaataccccaaaacaaacaaaaaaaaatacacaatataccactaaaaaaaaatactccaatattttac

SEQ ID NO: 4442 - DNA, 120 bp, synthetic construct
  source 1..120: mol_type = other DNA
gggtgttaatttttttatattttttggtttttgagtattaatatggttgagtaggtgttttagggtagataggaaaagatgtataatatgttattgaggagagatgttttagtgttttat

SEQ ID NO: 4443 - DNA, 120 bp, synthetic construct
  source 1..120: mol_type = other DNA
ctaactccctcatacttcctaacttctaaacatcaatataactaaacaaataccccaaaataacctaaaacaaacaaaaaaaaatacacaatataccactaaaaaaaaatactccaatat

SEQ ID NO: 4444 - DNA, 120 bp, synthetic construct
  source 1..120: mol_type = other DNA
ttaatttttttatattttttggtttttgagtattaatatggttgagtaggtgttttagggtgatttagggtagataggaaaagatgtataatatgttattgaggagagatgttttagtgt

SEQ ID NO: 4445 - DNA, 120 bp, synthetic construct; identical to SEQ ID NO: 4441
  source 1..120: mol_type = other DNA

SEQ ID NO: 4446 - DNA, 120 bp, synthetic construct; identical to SEQ ID NO: 4442
  source 1..120: mol_type = other DNA

SEQ ID NO: 4447 - DNA, 120 bp, synthetic construct; identical to SEQ ID NO: 4443
  source 1..120: mol_type = other DNA

SEQ ID NO: 4448 - DNA, 120 bp, synthetic construct; identical to SEQ ID NO: 4444
  source 1..120: mol_type = other DNA

SEQ ID NO: 4449 - DNA, 120 bp, synthetic construct
  source 1..120: mol_type = other DNA
aaaaaaaaaaccaaatttaacaacttatccttcacataaataatatctttccatctaccacaaaacactatatccctaaaaatttcactaaaataaaaacctcctacatctttctaaaat

SEQ ID NO: 4450 - DNA, 120 bp, synthetic construct
  source 1..120: mol_type = other DNA
aaagaagaggttagatttaataatttattttttatatagatggtatttttttatttgttataaaatgttgtatttttagaaattttattaaggtagaagttttttgtatttttttgagat

SEQ ID NO: 4451 - DNA, 120 bp, synthetic construct
  source 1..120: mol_type = other DNA
aaaaaaaaaaaaaaccaaatttaacaacttatccttcacataaataatatctttccatctacactatatccctaaaaatttcactaaaataaaaacctcctacatctttctaaaatttat

SEQ ID NO: 4452 - DNA, 120 bp, synthetic construct
  source 1..120: mol_type = other DNA
aaaaaaagaagaggttagatttaataatttattttttatatagatggtatttttttatttgtgttgtatttttagaaattttattaaggtagaagttttttgtatttttttgagatttat

SEQ ID NO: 4453 - DNA, 120 bp, synthetic construct
  source 1..120: mol_type = other DNA
aaaaaaaaaaccaaatttaacaacttatccttcacataaataatatctttccatctaccacaaaacgctatatccctaaaaatttcactaaaataaaaacctcctacatctttctaaaat

SEQ ID NO: 4454 - DNA, 120 bp, synthetic construct
  source 1..120: mol_type = other DNA
aaagaagaggttagatttaataatttattttttatatagatggtatttttttatttgttataaaacgttgtatttttagaaattttattaaggtagaagttttttgtatttttttgagat

SEQ ID NO: 4455 - DNA, 120 bp, synthetic construct
  source 1..120: mol_type = other DNA
aaaaaaaaaaaaaaccaaatttaacaacttatccttcacataaataatatctttccatctacgctatatccctaaaaatttcactaaaataaaaacctcctacatctttctaaaatttat

SEQ ID NO: 4456 - DNA, 120 bp, synthetic construct
  source 1..120: mol_type = other DNA
aaaaaaagaagaggttagatttaataatttattttttatatagatggtatttttttatttgcgttgtatttttagaaattttattaaggtagaagttttttgtatttttttgagatttat

SEQ ID NO: 4457 - DNA, 120 bp, synthetic construct
  source 1..120: mol_type = other DNA
aaacctctcactccccactataaaaccctccaataactccacatcacctaaaactataaaacctaaaactataaaacaaaactaaaaaacctaaatttaataaaaatacttcaaaaacaa

SEQ ID NO: 4458 - DNA, 120 bp, synthetic construct
  source 1..120: mol_type = other DNA
gagttttttattttttattgtaaagttttttggtggttttatattgtttaggattgtgaagtttaggattgtaaaataggattgagaagtttgggtttaatggaagtgttttgggagtgg

SEQ ID NO: 4459 - DNA, 120 bp, synthetic construct
  source 1..120: mol_type = other DNA
atcaaaacctctcactccccactataaaaccctccaataactccacatcacctaaaactataactataaaacaaaactaaaaaacctaaatttaataaaaatacttcaaaaacaaaatac

SEQ ID NO: 4460 - DNA, 120 bp, synthetic construct
  source 1..120: mol_type = other DNA
gttggagttttttattttttattgtaaagttttttggtggttttatattgtttaggattgtgattgtaaaataggattgagaagtttgggtttaatggaagtgttttgggagtggggtgt

SEQ ID NO: 4461 - DNA, 120 bp, synthetic construct
  source 1..120: mol_type = other DNA
aaacctctcactccccactataaaaccctccgataactccacatcgcctaaaactataaaacctaaaactataaaacaaaactaaaaaacctaaatttaataaaaatacttcgaaaacga

SEQ ID NO: 4462 - DNA, 120 bp, synthetic construct
  source 1..120: mol_type = other DNA
gagttttttattttttattgtaaagtttttcggtggttttatatcgtttaggattgtgaagtttaggattgtaaaataggattgagaagtttgggtttaatggaagtgtttcgggagcgg

SEQ ID NO: 4463 - DNA, 120 bp, synthetic construct
  source 1..120: mol_type = other DNA
atcgaaacctctcactccccactataaaaccctccgataactccacatcgcctaaaactataactataaaacaaaactaaaaaacctaaatttaataaaaatacttcgaaaacgaaatac

SEQ ID NO: 4464 - DNA, 120 bp, synthetic construct
  source 1..120: mol_type = other DNA
gtcggagttttttattttttattgtaaagtttttcggtggttttatatcgtttaggattgtgattgtaaaataggattgagaagtttgggtttaatggaagtgtttcgggagcggggtgt

SEQ ID NO: 4465 - DNA, 120 bp, synthetic construct
  source 1..120: mol_type = other DNA
caacatattctaactccttaaaatatttattaaacaactacatacaaaaccctataacaaaaatacctaaaactaaaaataacaatattattcctaccctaaaattaactaacactttat

SEQ ID NO: 4466 - DNA, 120 bp, synthetic construct
  source 1..120: mol_type = other DNA
tagtatgttttgattttttaaaatatttgttaaataattatgtgtaaagttttataatagaggtatttgaggttgaaaatggtagtgttgtttttgttttagggttaattaatattttgt

SEQ ID NO: 4467 - DNA, 120 bp, synthetic construct
  source 1..120: mol_type = other DNA
tatacaacatattctaactccttaaaatatttattaaacaactacatacaaaaccctataactaaaactaaaaataacaatattattcctaccctaaaattaactaacactttatctaca

SEQ ID NO: 4468 - DNA, 120 bp, synthetic construct
  source 1..120: mol_type = other DNA
tatatagtatgttttgattttttaaaatatttgttaaataattatgtgtaaagttttataattgaggttgaaaatggtagtgttgtttttgttttagggttaattaatattttgtttgtg

SEQ ID NO: 4469 - DNA, 120 bp, synthetic construct
  source 1..120: mol_type = other DNA
caacatattctaactccttaaaatatttattaaacaactacgtacaaaaccctataacaaaaatacctaaaactaaaaataacaatattattcctaccctaaaattaactaacactttat

SEQ ID NO: 4470 - DNA, 120 bp, synthetic construct
  source 1..120: mol_type = other DNA
tagtatgttttgattttttaaaatatttgttaaataattacgtgtaaagttttataatagaggtatttgaggttgaaaatggtagtgttgtttttgttttagggttaattaatattttgt

SEQ ID NO: 4471 - DNA, 120 bp, synthetic construct
  source 1..120: mol_type = other DNA
tatacaacatattctaactccttaaaatatttattaaacaactacgtacaaaaccctataactaaaactaaaaataacaatattattcctaccctaaaattaactaacactttatctacg

SEQ ID NO: 4472 - DNA, 120 bp, synthetic construct
  source 1..120: mol_type = other DNA
tatatagtatgttttgattttttaaaatatttgttaaataattacgtgtaaagttttataattgaggttgaaaatggtagtgttgtttttgttttagggttaattaatattttgtttgcg

SEQ ID NO: 4473 - DNA, 120 bp, synthetic construct
  source 1..120: mol_type = other DNA
aacttcaataaaacatatactaaatcacacaactaattatttaataattctaaatactaaaacaaaaaaacttaactacacccataaatcaataaaaattacccctactaaataacattt

SEQ ID NO: 4474 - DNA, 120 bp, synthetic construct
  source 1..120: mol_type = other DNA
gattttagtgaagtatatattaaattatataattaattatttgataattttggatgttaagatagggaagtttgattgtatttatgggttagtggaggttgtttttattaagtgatattt

SEQ ID NO: 4475 - DNA, 120 bp, synthetic construct
  source 1..120: mol_type = other DNA
caataaaacatatactaaatcacacaactaattatttaataattctaaatactaaaacaaaatattacaaaaaaacttaactacacccataaatcaataaaaattacccctactaaataa

SEQ ID NO: 4476 - DNA, 120 bp, synthetic construct
  source 1..120: mol_type = other DNA
tagtgaagtatatattaaattatataattaattatttgataattttggatgttaagataggatattatagggaagtttgattgtatttatgggttagtggaggttgtttttattaagtga

SEQ ID NO: 4477 - DNA, 120 bp, synthetic construct; identical to SEQ ID NO: 4473
  source 1..120: mol_type = other DNA

SEQ ID NO: 4478 - DNA, 120 bp, synthetic construct; identical to SEQ ID NO: 4474
  source 1..120: mol_type = other DNA

SEQ ID NO: 4479 - DNA, 120 bp, synthetic construct; identical to SEQ ID NO: 4475
  source 1..120: mol_type = other DNA

SEQ ID NO: 4480 - DNA, 120 bp, synthetic construct; identical to SEQ ID NO: 4476
  source 1..120: mol_type = other DNA

SEQ ID NO: 4481 - DNA, 120 bp, synthetic construct
  source 1..120: mol_type = other DNA
tatctacccacaaatattacctaaaaatatatttcaccccaaacactatactaaatacaaaaaatacaaaaataaataatatacctactctttattctcttataattcactatctaataa

SEQ ID NO: 4482 - DNA, 120 bp, synthetic construct
  source 1..120: mol_type = other DNA
tatttgtttataaatattgtttaaggatatattttattttaggtattgtgttggatgtagaggatatagaaatgagtaatgtatttgttttttatttttttgtggtttattgtttagtga

SEQ ID NO: 4483 - DNA, 120 bp, synthetic construct
  source 1..120: mol_type = other DNA
taactatctacccacaaatattacctaaaaatatatttcaccccaaacactatactaaatacaaaaataaataatatacctactctttattctcttataattcactatctaataaaattt

SEQ ID NO: 4484 - DNA, 120 bp, synthetic construct
  source 1..120: mol_type = other DNA
tggttatttgtttataaatattgtttaaggatatattttattttaggtattgtgttggatgtagaaatgagtaatgtatttgttttttatttttttgtggtttattgtttagtgaggttt

SEQ ID NO: 4485 - DNA, 120 bp, synthetic construct; identical to SEQ ID NO: 4481
  source 1..120: mol_type = other DNA

SEQ ID NO: 4486 - DNA, 120 bp, synthetic construct; identical to SEQ ID NO: 4482
  source 1..120: mol_type = other DNA

SEQ ID NO: 4487 - DNA, 120 bp, synthetic construct; identical to SEQ ID NO: 4483
  source 1..120: mol_type = other DNA

SEQ ID NO: 4488 - DNA, 120 bp, synthetic construct; identical to SEQ ID NO: 4484
  source 1..120: mol_type = other DNA

SEQ ID NO: 4489 - DNA, 120 bp, synthetic construct
  source 1..120: mol_type = other DNA
ataatcctctccccttaaattttcataaaacctatataacttaattttaactaattaaatataaaatatatataattatatatatataaatctattccataaacctataatattcatctc

SEQ ID NO: 4490 - DNA, 120 bp, synthetic construct
  source 1..120: mol_type = other DNA
gtaattttttttttttgagtttttatgggatttatgtgatttgattttaattaattggatatgggatgtatgtgattatgtgtatgtgaatttgttttataagtttgtaatatttatttt

SEQ ID NO: 4491 - DNA, 120 bp, synthetic construct
  source 1..120: mol_type = other DNA
cctctccccttaaattttcataaaacctatataacttaattttaactaattaaatataacaaaaataaaatatatataattatatatatataaatctattccataaacctataatattca

SEQ ID NO: 4492 - DNA, 120 bp, synthetic construct
  source 1..120: mol_type = other DNA
tttttttttttgagtttttatgggatttatgtgatttgattttaattaattggatatggtaaaagtgggatgtatgtgattatgtgtatgtgaatttgttttataagtttgtaatattta

SEQ ID NO: 4493 - DNA, 120 bp, synthetic construct; identical to SEQ ID NO: 4489
  source 1..120: mol_type = other DNA

SEQ ID NO: 4494 - DNA, 120 bp, synthetic construct; identical to SEQ ID NO: 4490
  source 1..120: mol_type = other DNA

SEQ ID NO: 4495 - DNA, 120 bp, synthetic construct; identical to SEQ ID NO: 4491
  source 1..120: mol_type = other DNA

SEQ ID NO: 4496 - DNA, 120 bp, synthetic construct; identical to SEQ ID NO: 4492
  source 1..120: mol_type = other DNA

SEQ ID NO: 4497 - DNA, 120 bp, synthetic construct
  source 1..120: mol_type = other DNA
ctattataactattctaaatactataactaaaccatataccataataaaaaaaacaatacccccaaatacctatccccacactcaaaaacactaccaaatctaaacttcataatctaaac

SEQ ID NO: 4498 - DNA, 120 bp, synthetic construct
  source 1..120: mol_type = other DNA
ttattatggttattttgggtgttgtgattaagttatatgttatggtggaagggatagtgtttttaggtgtttgtttttatatttaaggatattgttaagtttaagttttatggtttaggt

SEQ ID NO: 4499 - DNA, 120 bp, synthetic construct
  source 1..120: mol_type = other DNA
cccttctattataactattctaaatactataactaaaccatataccataataaaaaaaacaatacctatccccacactcaaaaacactaccaaatctaaacttcataatctaaacccaaa

SEQ ID NO: 4500 - DNA, 120 bp, synthetic construct
  source 1..120: mol_type = other DNA
tttttttattatggttattttgggtgttgtgattaagttatatgttatggtggaagggatagtgtttgtttttatatttaaggatattgttaagtttaagttttatggtttaggtttaga

SEQ ID NO: 4501 - DNA, 120 bp, synthetic construct; identical to SEQ ID NO: 4497
  source 1..120: mol_type = other DNA

SEQ ID NO: 4502 - DNA, 120 bp, synthetic construct; identical to SEQ ID NO: 4498
  source 1..120: mol_type = other DNA

SEQ ID NO: 4503 - DNA, 120 bp, synthetic construct; identical to SEQ ID NO: 4499
  source 1..120: mol_type = other DNA

SEQ ID NO: 4504 - DNA, 120 bp, synthetic construct; identical to SEQ ID NO: 4500
  source 1..120: mol_type = other DNA

SEQ ID NO: 4505 - DNA, 120 bp, synthetic construct
  source 1..120: mol_type = other DNA
acaactacattaaattcaacccaatcaatacttactcaatacttcctataattcaaacactatacaaaaccctaaaaacacaaaattaaacaaaatacaaactctaccctcaatacaaaa

SEQ ID NO: 4506 - DNA, 120 bp, synthetic construct
  source 1..120: mol_type = other DNA
atgattgtattgaatttaatttaattaatatttatttaatattttttgtgatttagatattgtataaggttttggggatatagggttaaatagaatataagttttatttttagtgtagag

SEQ ID NO: 4507 - DNA, 120 bp, synthetic construct
  source 1..120: mol_type = other DNA
aaaacacaactacattaaattcaacccaatcaatacttactcaatacttcctataattcaaaaaccctaaaaacacaaaattaaacaaaatacaaactctaccctcaatacaaaaataaa

SEQ ID NO: 4508 - DNA, 120 bp, synthetic construct
  source 1..120: mol_type = other DNA
ggagtatgattgtattgaatttaatttaattaatatttatttaatattttttgtgatttagaggttttggggatatagggttaaatagaatataagttttatttttagtgtagaggtgga

SEQ ID NO: 4509 - DNA, 120 bp, synthetic construct
  source 1..120: mol_type = other DNA
acgactacattaaattcaacccaatcaatacttactcaatacttcctataattcaaacactatacaaaaccctaaaaacacaaaattaaacaaaatacaaactctaccctcaatacaaaa

SEQ ID NO: 4510 - DNA, 120 bp, synthetic construct
  source 1..120: mol_type = other DNA
acgattgtattgaatttaatttaattaatatttatttaatattttttgtgatttagatattgtataaggttttggggatatagggttaaatagaatataagttttatttttagtgtagag

SEQ ID NO: 4511 - DNA, 120 bp, synthetic construct
  source 1..120: mol_type = other DNA
aaaacacgactacattaaattcaacccaatcaatacttactcaatacttcctataattcaaaaaccctaaaaacacaaaattaaacaaaatacaaactctaccctcaatacaaaaataaa

SEQ ID NO: 4512 - DNA, 120 bp, synthetic construct
  source 1..120: mol_type = other DNA
ggagtacgattgtattgaatttaatttaattaatatttatttaatattttttgtgatttagaggttttggggatatagggttaaatagaatataagttttatttttagtgtagaggtgga

SEQ ID NO: 4513 - DNA, 120 bp, synthetic construct
  source 1..120: mol_type = other DNA
aataccaattttaattctcaaattaatatatcatttttcctatttaaaatttttctcctatacttaaaatcctttaacttctccactacctctcacatctttttatataaatttatattt

SEQ ID NO: 4514 - DNA, 120 bp, synthetic construct
  source 1..120: mol_type = other DNA
aatattaattttggtttttaggttaatatgttattttttttgtttgagattttttttttgtatttagagttttttaatttttttattgttttttatatttttttgtataaatttgtattt

SEQ ID NO: 4515 - DNA, 120 bp, synthetic construct
  source 1..120: mol_type = other DNA
ccaattttaattctcaaattaatatatcatttttcctatttaaaatttttctcctatacattccacttaaaatcctttaacttctccactacctctcacatctttttatataaatttata

SEQ ID NO: 4516 - DNA, 120 bp, synthetic construct
  source 1..120: mol_type = other DNA
ttaattttggtttttaggttaatatgttattttttttgtttgagattttttttttgtatgttttatttagagttttttaatttttttattgttttttatatttttttgtataaatttgta

SEQ ID NO: 4517 - DNA, 120 bp, synthetic construct; identical to SEQ ID NO: 4513
  source 1..120: mol_type = other DNA

SEQ ID NO: 4518 - DNA, 120 bp, synthetic construct; identical to SEQ ID NO: 4514
  source 1..120: mol_type = other DNA

SEQ ID NO: 4519 - DNA, 120 bp, synthetic construct
  source 1..120: mol_type = other DNA
ccaattttaattctcaaattaatatatcatttttcctatttaaaatttttctcctatacgttccacttaaaatcctttaacttctccactacctctcacatctttttatataaatttata

SEQ ID NO: 4520 - DNA, 120 bp, synthetic construct
  source 1..120: mol_type = other DNA
ttaattttggtttttaggttaatatgttattttttttgtttgagattttttttttgtacgttttatttagagttttttaatttttttattgttttttatatttttttgtataaatttgta

SEQ ID NO: 4521 - DNA, 120 bp, synthetic construct
  source 1..120: mol_type = other DNA
cattacaaaattaacatacctatattactataaaaactaactttacaaaattttattaaaaataaaaaaaacatattttataataaaataatcaaatcatcaaaaaaacataaaattcac

SEQ ID NO: 4522 - DNA, 120 bp, synthetic construct
  source 1..120: mol_type = other DNA
tattataaaattggtatgtttatattattataaaaattgattttatagaattttgttagagataaagagaatatattttatggtagaatagttaaattattaagaggatataaaatttat

SEQ ID NO: 4523 - DNA, 120 bp, synthetic construct
  source 1..120: mol_type = other DNA
taaacattacaaaattaacatacctatattactataaaaactaactttacaaaattttattaaaaacatattttataataaaataatcaaatcatcaaaaaaacataaaattcacaaata

SEQ ID NO: 4524 - DNA, 120 bp, synthetic construct
  source 1..120: mol_type = other DNA
tgggtattataaaattggtatgtttatattattataaaaattgattttatagaattttgttgagaatatattttatggtagaatagttaaattattaagaggatataaaatttatagata

SEQ ID NO: 4525 - DNA, 120 bp, synthetic construct; identical to SEQ ID NO: 4521
  source 1..120: mol_type = other DNA

SEQ ID NO: 4526 - DNA, 120 bp, synthetic construct; identical to SEQ ID NO: 4522
  source 1..120: mol_type = other DNA

SEQ ID NO: 4527 - DNA, 120 bp, synthetic construct; identical to SEQ ID NO: 4523
  source 1..120: mol_type = other DNA

SEQ ID NO: 4528 - DNA, 120 bp, synthetic construct; identical to SEQ ID NO: 4524
  source 1..120: mol_type = other DNA

SEQ ID NO: 4529 - DNA, 120 bp, synthetic construct
  source 1..120: mol_type = other DNA
ttttttttaaaaaaaaaatacataataatacttacttttactttataaaccaaattatttccattttctctaactattttaatacaaaaataaataaaactacaaattaatcattcttaa

SEQ ID NO: 4530 - DNA, 120 bp, synthetic construct
  source 1..120: mol_type = other DNA
ttttttttaaggggaggatgtataataatgtttgtttttgttttataaattaaattatttttattttttttgattgttttggtatagaaataaataggattgtaaattagttatttttaa

SEQ ID NO: 4531 - DNA, 120 bp, synthetic construct
  source 1..120: mol_type = other DNA
ttttaaaaaaaaaatacataataatacttacttttactttataaaccaaattatttccatataaacattttctctaactattttaatacaaaaataaataaaactacaaattaatcattc

SEQ ID NO: 4532 - DNA, 120 bp, synthetic construct
  source 1..120: mol_type = other DNA
ttttaaggggaggatgtataataatgtttgtttttgttttataaattaaattatttttatatagatattttttttgattgttttggtatagaaataaataggattgtaaattagttattt

SEQ ID NO: 4533 - DNA, 120 bp, synthetic construct; identical to SEQ ID NO: 4529
  source 1..120: mol_type = other DNA

SEQ ID NO: 4534 - DNA, 120 bp, synthetic construct; identical to SEQ ID NO: 4530
  source 1..120: mol_type = other DNA

SEQ ID NO: 4535 - DNA, 120 bp, synthetic construct; identical to SEQ ID NO: 4531
  source 1..120: mol_type = other DNA

SEQ ID NO: 4536 - DNA, 120 bp, synthetic construct; identical to SEQ ID NO: 4532
  source 1..120: mol_type = other DNA

SEQ ID NO: 4537 - DNA, 120 bp, synthetic construct
  source 1..120: mol_type = other DNA
aattaaaaacaaacaaaaaaatcttaaataaacaaactacccaactaaatcccaaaacatatatttcaataataaaaaaactaaaataaaaaaaaaataaatccataaatattaacaatc

SEQ ID NO: 4538 - DNA, 120 bp, synthetic construct
  source 1..120: mol_type = other DNA
gattaagggtagataaaaaaattttgaataaatagattgtttagttaaattttaaagtatatattttagtggtagagagattgagatgaaagaaaggtaaatttataggtattaatagtt

SEQ ID NO: 4539 - DNA, 120 bp, synthetic construct
  source 1..120: mol_type = other DNA
actaaattaaaaacaaacaaaaaaatcttaaataaacaaactacccaactaaatcccaaaacaataataaaaaaactaaaataaaaaaaaaataaatccataaatattaacaatcaaaaa

SEQ ID NO: 4540 - DNA, 120 bp, synthetic construct
  source 1..120: mol_type = other DNA
gttggattaagggtagataaaaaaattttgaataaatagattgtttagttaaattttaaagtagtggtagagagattgagatgaaagaaaggtaaatttataggtattaatagttaagaa

SEQ ID NO: 4541 - DNA, 120 bp, synthetic construct; identical to SEQ ID NO: 4537
  source 1..120: mol_type = other DNA

SEQ ID NO: 4542 - DNA, 120 bp, synthetic construct; identical to SEQ ID NO: 4538
  source 1..120: mol_type = other DNA

SEQ ID NO: 4543 - DNA, 120 bp, synthetic construct; identical to SEQ ID NO: 4539
  source 1..120: mol_type = other DNA

SEQ ID NO: 4544 - DNA, 120 bp, synthetic construct; identical to SEQ ID NO: 4540
  source 1..120: mol_type = other DNA

SEQ ID NO: 4545 - DNA, 120 bp, synthetic construct
  source 1..120: mol_type = other DNA
tccttacatcttcctctctaaattccttaaatcacataacaaaaaaacacttaattatcataaactcaatataaaaaaaataaaaacaaattccaaaatacatactaaaatctatatatt

SEQ ID NO: 4546 - DNA, 120 bp, synthetic construct
  source 1..120: mol_type = other DNA
tttttatatttttttttttagattttttgagttatataataagaaaatatttggttattatgaatttggtgtaaaaaaagtaaaagtaagttttaagatgtatgttaggatttgtgtatt

SEQ ID NO: 4547 - DNA, 120 bp, synthetic construct
  source 1..120: mol_type = other DNA
aatatccttacatcttcctctctaaattccttaaatcacataacaaaaaaacacttaattatcaatataaaaaaaataaaaacaaattccaaaatacatactaaaatctatatattcaat

SEQ ID NO: 4548 - DNA, 120 bp, synthetic construct
  source 1..120: mol_type = other DNA
aatatttttatatttttttttttagattttttgagttatataataagaaaatatttggttattggtgtaaaaaaagtaaaagtaagttttaagatgtatgttaggatttgtgtatttagt

SEQ ID NO: 4549 - DNA, 120 bp, synthetic construct
  source 1..120: mol_type = other DNA
tccttacatcttcctctctaaattccttaaatcacataacaaaaaaacacttaattatcataaactcgatataaaaaaaataaaaacaaattccaaaatacatactaaaatctatatatt

SEQ ID NO: 4550 - DNA, 120 bp, synthetic construct
  source 1..120: mol_type = other DNA
tttttatatttttttttttagattttttgagttatataataagaaaatatttggttattatgaattcggtgtaaaaaaagtaaaagtaagttttaagatgtatgttaggatttgtgtatt

SEQ ID NO: 4551 - DNA, 120 bp, synthetic construct
  source 1..120: mol_type = other DNA
aatatccttacatcttcctctctaaattccttaaatcacataacaaaaaaacacttaattatcgatataaaaaaaataaaaacaaattccaaaatacatactaaaatctatatattcaat

SEQ ID NO: 4552 - DNA, 120 bp, synthetic construct
  source 1..120: mol_type = other DNA
aatatttttatatttttttttttagattttttgagttatataataagaaaatatttggttatcggtgtaaaaaaagtaaaagtaagttttaagatgtatgttaggatttgtgtatttagt

SEQ ID NO: 4553 - DNA, 120 bp, synthetic construct
  source 1..120: mol_type = other DNA
caacaaaatttctaaaaacaacaacaaccaccttttaccaactataccaacaattctcaaacttaaatatacacaaaaatttcctaaaaaatattactaaaccccatctccaacttctaa

SEQ ID NO: 4554 - DNA, 120 bp, synthetic construct
  source 1..120: mol_type = other DNA
taataaaatttttaaggataataataattattttttgttaattatgttaatagtttttaaatttgaatgtgtataagaattttttggagaatattattagattttatttttaatttttgg

SEQ ID NO: 4555 - DNA, 120 bp, synthetic construct
  source 1..120: mol_type = other DNA
atacaacaaaatttctaaaaacaacaacaaccaccttttaccaactataccaacaattctcaatatacacaaaaatttcctaaaaaatattactaaaccccatctccaacttctaattca

SEQ ID NO: 4556 - DNA, 120 bp, synthetic construct
  source 1..120: mol_type = other DNA
gtgtaataaaatttttaaggataataataattattttttgttaattatgttaatagtttttaatgtgtataagaattttttggagaatattattagattttatttttaatttttggttta

SEQ ID NO: 4557 - DNA, 120 bp, synthetic construct; identical to SEQ ID NO: 4553
  source 1..120: mol_type = other DNA

SEQ ID NO: 4558 - DNA, 120 bp, synthetic construct; identical to SEQ ID NO: 4554
  source 1..120: mol_type = other DNA

SEQ ID NO: 4559 - DNA, 120 bp, synthetic construct; identical to SEQ ID NO: 4555
  source 1..120: mol_type = other DNA

SEQ ID NO: 4560 - DNA, 120 bp, synthetic construct; identical to SEQ ID NO: 4556
  source 1..120: mol_type = other DNA

SEQ ID NO: 4561 - DNA, 120 bp, synthetic construct
  source 1..120: mol_type = other DNA
ataaaaaataatatcctaacaaactactatcaacaaacaatattaaaacctaatcaaaaaactcaaaatttctacaaatttcaactatacaattttatctcttccacttctaaaacaaaa

SEQ ID NO: 4562 - DNA, 120 bp, synthetic construct
  source 1..120: mol_type = other DNA
ataaagaataatgttttggtaagttattattaatgaatagtattagggtttaattagaagatttaggatttttatagattttagttgtgtgattttattttttttatttttggaatagga

SEQ ID NO: 4563 - DNA, 120 bp, synthetic construct
  source 1..120: mol_type = other DNA
acccataaaaaataatatcctaacaaactactatcaacaaacaatattaaaacctaatcaaaaatttctacaaatttcaactatacaattttatctcttccacttctaaaacaaaacctt

SEQ ID NO: 4564 - DNA, 120 bp, synthetic construct
  source 1..120: mol_type = other DNA
atttataaagaataatgttttggtaagttattattaatgaatagtattagggtttaattagggatttttatagattttagttgtgtgattttattttttttatttttggaataggatttt

SEQ ID NO: 4565 - DNA, 120 bp, synthetic construct
  source 1..120: mol_type = other DNA
ataaaaaataatatcctaacaaactactatcaacgaacaatattaaaacctaatcaaaaaactcaaaatttctacaaatttcaactatacgattttatctcttccacttctaaaacaaaa

SEQ ID NO: 4566 - DNA, 120 bp, synthetic construct
  source 1..120: mol_type = other DNA
ataaagaataatgttttggtaagttattattaacgaatagtattagggtttaattagaagatttaggatttttatagattttagttgtgcgattttattttttttatttttggaatagga

SEQ ID NO: 4567 - DNA, 120 bp, synthetic construct
  source 1..120: mol_type = other DNA
acccataaaaaataatatcctaacaaactactatcaacgaacaatattaaaacctaatcaaaaatttctacaaatttcaactatacgattttatctcttccacttctaaaacaaaacctt

SEQ ID NO: 4568 - DNA, 120 bp, synthetic construct
  source 1..120: mol_type = other DNA
atttataaagaataatgttttggtaagttattattaacgaatagtattagggtttaattagggatttttatagattttagttgtgcgattttattttttttatttttggaataggatttt

SEQ ID NO: 4569 - DNA, 120 bp, synthetic construct
  source 1..120: mol_type = other DNA
aaattaatttattaaaacacttaatattactacttacaaataataaacactttttaaatataccttaaaaattctatctattactttatatttactatattttaaatttatatatattca

SEQ ID NO: 4570 - DNA, 120 bp, synthetic construct
  source 1..120: mol_type = other DNA
agattaatttattaaagtatttaatattgttatttgtaagtagtaagtattttttgaatatattttaaaaattttatttattgttttgtatttgttgtgttttgaatttatatgtattta

SEQ ID NO: 4571 - DNA, 120 bp, synthetic construct
  source 1..120: mol_type = other DNA
taatttattaaaacacttaatattactacttacaaataataaacactttttaaatattaaaatcaccttaaaaattctatctattactttatatttactatattttaaatttatatatat

SEQ ID NO: 4572 - DNA, 120 bp, synthetic construct
  source 1..120: mol_type = other DNA
taatttattaaagtatttaatattgttatttgtaagtagtaagtattttttgaatattagggttattttaaaaattttatttattgttttgtatttgttgtgttttgaatttatatgtat

SEQ ID NO: 4573 - DNA, 120 bp, synthetic construct; identical to SEQ ID NO: 4569
  source 1..120: mol_type = other DNA

SEQ ID NO: 4574 - DNA, 120 bp, synthetic construct; identical to SEQ ID NO: 4570
  source 1..120: mol_type = other DNA

SEQ ID NO: 4575 - DNA, 120 bp, synthetic construct; identical to SEQ ID NO: 4571
  source 1..120: mol_type = other DNA

SEQ ID NO: 4576 - DNA, 120 bp, synthetic construct; identical to SEQ ID NO: 4572
  source 1..120: mol_type = other DNA

SEQ ID NO: 4577 - DNA, 120 bp, synthetic construct
  source 1..120: mol_type = other DNA
aattcatattaaatcaaaacttttataattcctataaataatttatccataactcaataatctatttaaacctaaaatatataatataactttaaactacaaaaataaactaaaataatt

SEQ ID NO: 4578 - DNA, 120 bp, synthetic construct
  source 1..120: mol_type = other DNA
ggtttatattgagttaggatttttatgatttttgtgaatgatttatttatgatttagtaatttatttaagtttgaagtgtataatgtgattttaagttgtaaaaatggattgagatggtt

SEQ ID NO: 4579 - DNA, 120 bp, synthetic construct
  source 1..120: mol_type = other DNA
taaaaattcatattaaatcaaaacttttataattcctataaataatttatccataactcaataaacctaaaatatataatataactttaaactacaaaaataaactaaaataattaaaat

SEQ ID NO: 4580 - DNA, 120 bp, synthetic construct
  source 1..120: mol_type = other DNA
taaaggtttatattgagttaggatttttatgatttttgtgaatgatttatttatgatttagtaagtttgaagtgtataatgtgattttaagttgtaaaaatggattgagatggttaaagt

SEQ ID NO: 4581 - DNA, 120 bp, synthetic construct; identical to SEQ ID NO: 4577
  source 1..120: mol_type = other DNA

SEQ ID NO: 4582 - DNA, 120 bp, synthetic construct; identical to SEQ ID NO: 4578
  source 1..120: mol_type = other DNA

SEQ ID NO: 4583 - DNA, 120 bp, synthetic construct; identical to SEQ ID NO: 4579
  source 1..120: mol_type = other DNA

SEQ ID NO: 4584 - DNA, 120 bp, synthetic construct; identical to SEQ ID NO: 4580
  source 1..120: mol_type = other DNA

SEQ ID NO: 4585 - DNA, 120 bp, synthetic construct
  source 1..120: mol_type = other DNA
ttaacaaatctatttaacattcatttttatttcaataaatcaaatttacttaacactcaaatacactactaattaattcacaacaaaaaaataattaatctttccctaacaaaacacttt

SEQ ID NO: 4586 - DNA, 120 bp, synthetic construct
  source 1..120: mol_type = other DNA
ttagtaaatttgtttgatatttatttttattttagtagattaggtttgtttagtatttaaatatattattaattaatttataataaggaagtaattaatttttttttggtaaggtatttt

SEQ ID NO: 4587 - DNA, 120 bp, synthetic construct
  source 1..120: mol_type = other DNA
caaattaacaaatctatttaacattcatttttatttcaataaatcaaatttacttaacactctactaattaattcacaacaaaaaaataattaatctttccctaacaaaacactttaatt

SEQ ID NO: 4588 - DNA, 120 bp, synthetic construct
  source 1..120: mol_type = other DNA
taggttagtaaatttgtttgatatttatttttattttagtagattaggtttgtttagtattttattaattaatttataataaggaagtaattaatttttttttggtaaggtattttgatt

SEQ ID NO: 4589 - DNA, 120 bp, synthetic construct; identical to SEQ ID NO: 4585
  source 1..120: mol_type = other DNA

SEQ ID NO: 4590 - DNA, 120 bp, synthetic construct; identical to SEQ ID NO: 4586
  source 1..120: mol_type = other DNA

SEQ ID NO: 4591 - DNA, 120 bp, synthetic construct; identical to SEQ ID NO: 4587
  source 1..120: mol_type = other DNA

SEQ ID NO: 4592 - DNA, 120 bp, synthetic construct; identical to SEQ ID NO: 4588
  source 1..120: mol_type = other DNA

SEQ ID NO: 4593 - DNA, 120 bp, synthetic construct
  source 1..120: mol_type = other DNA
aataattttcaactaaaaaatacaactattacatttcaaaaaacaataaaaacaaaaaataacaaattaaaaacacaaaaaaataaaataaaatcctttaaaaaataaataccaaaaaac

SEQ ID NO: 4594 - DNA, 120 bp, synthetic construct
  source 1..120: mol_type = other DNA
gatgatttttagttgaaaagtgtaattgttatattttagaaggtaatggaagtaggaaataatagattgaagatgtagaaaaatggagtggagttttttaaaagatgggtattaagaaat

SEQ ID NO: 4595 - DNA, 120 bp, synthetic construct
  source 1..120: mol_type = other DNA
aaaaaaataattttcaactaaaaaatacaactattacatttcaaaaaacaataaaaacaaattaaaaacacaaaaaaataaaataaaatcctttaaaaaataaataccaaaaaacccccc

SEQ ID NO: 4596 - DNA, 120 bp, synthetic construct
  source 1..120: mol_type = other DNA
aaaaagatgatttttagttgaaaagtgtaattgttatattttagaaggtaatggaagtaggttgaagatgtagaaaaatggagtggagttttttaaaagatgggtattaagaaatttttt

SEQ ID NO: 4597 - DNA, 120 bp, synthetic construct
  source 1..120: mol_type = other DNA
aataattttcaactaaaaaatacaactattacatttcaaaaaacaataaaaacaaaaaataacaaattaaaaacgcaaaaaaataaaataaaatcctttaaaaaataaataccaaaaaac

SEQ ID NO: 4598 - DNA, 120 bp, synthetic construct
  source 1..120: mol_type = other DNA
gatgatttttagttgaaaagtgtaattgttatattttagaaggtaatggaagtaggaaataatagattgaagacgtagaaaaatggagtggagttttttaaaagatgggtattaagaaat

SEQ ID NO: 4599 - DNA, 120 bp, synthetic construct
  source 1..120: mol_type = other DNA
aaaaaaataattttcaactaaaaaatacaactattacatttcaaaaaacaataaaaacaaattaaaaacgcaaaaaaataaaataaaatcctttaaaaaataaataccaaaaaacccccc

SEQ ID NO: 4600 - DNA, 120 bp, synthetic construct
  source 1..120: mol_type = other DNA
aaaaagatgatttttagttgaaaagtgtaattgttatattttagaaggtaatggaagtaggttgaagacgtagaaaaatggagtggagttttttaaaagatgggtattaagaaatttttt

SEQ ID NO: 4601 - DNA, 120 bp, synthetic construct
  source 1..120: mol_type = other DNA
tcctaaataataaaaatataaaaaaataaaaatttcacataccaataattaataaaaacattaatcaaaacaaattttataaaaaacaatttaacaatcttaacacaacaatactaccaa

SEQ ID NO: 4602 - DNA, 120 bp, synthetic construct
  source 1..120: mol_type = other DNA
ttttgagtgataagggtgtggggaaataggaattttatatgttagtggttggtagaagtattaattagaataagttttatggaggataatttggtagttttgatatagtagtattattaa

SEQ ID NO: 4603 - DNA, 120 bp, synthetic construct
  source 1..120: mol_type = other DNA
tttctcctaaataataaaaatataaaaaaataaaaatttcacataccaataattaataaaacaaaacaaattttataaaaaacaatttaacaatcttaacacaacaatactaccaattat

SEQ ID NO: 4604 - DNA, 120 bp, synthetic construct
  source 1..120: mol_type = other DNA
ttttttttgagtgataagggtgtggggaaataggaattttatatgttagtggttggtagaatagaataagttttatggaggataatttggtagttttgatatagtagtattattaattgt

SEQ ID NO: 4605 - DNA, 120 bp, synthetic construct; identical to SEQ ID NO: 4601
  source 1..120: mol_type = other DNA

SEQ ID NO: 4606 - DNA, 120 bp, synthetic construct; identical to SEQ ID NO: 4602
  source 1..120: mol_type = other DNA

SEQ ID NO: 4607 - DNA, 120 bp, synthetic construct; identical to SEQ ID NO: 4603
  source 1..120: mol_type = other DNA

SEQ ID NO: 4608 - DNA, 120 bp, synthetic construct; identical to SEQ ID NO: 4604
  source 1..120: mol_type = other DNA

SEQ ID NO: 4609 - DNA, 120 bp, synthetic construct
  source 1..120: mol_type = other DNA
caaacaaaaaatacccaataaatacttattaaaataacaaaataaactctaatacttctccccaaaaatatacctaaaaaataaaactaaaatttcacccatcaaaaaaaacaaaaacat

SEQ ID NO: 4610 - DNA, 120 bp, synthetic construct
  source 1..120: mol_type = other DNA
taagtagaaagtgtttaataaatatttgttgaaataataaaatgggttttgatgtttttttttaagaatgtgtttgggaggtgaggttggagttttatttattgagaaaagtagaaatat

SEQ ID NO: 4611 - DNA, 120 bp, synthetic construct
  source 1..120: mol_type = other DNA
ctaacaaacaaaaaatacccaataaatacttattaaaataacaaaataaactctaatacttaatatacctaaaaaataaaactaaaatttcacccatcaaaaaaaacaaaaacatccaaa

SEQ ID NO: 4612 - DNA, 120 bp, synthetic construct
  source 1..120: mol_type = other DNA
ttgataagtagaaagtgtttaataaatatttgttgaaataataaaatgggttttgatgtttaatgtgtttgggaggtgaggttggagttttatttattgagaaaagtagaaatatttaga

SEQ ID NO: 4613 - DNA, 120 bp, synthetic construct
  source 1..120: mol_type = other DNA
caaacaaaaaatacccaataaatacttattaaaataacaaaataaactctaatacttctccccaaaaatatacctaaaaaataaaactaaaatttcacccatcgaaaaaaacaaaaacat

SEQ ID NO: 4614 - DNA, 120 bp, synthetic construct
  source 1..120: mol_type = other DNA
taagtagaaagtgtttaataaatatttgttgaaataataaaatgggttttgatgtttttttttaagaatgtgtttgggaggtgaggttggagttttatttatcgagaaaagtagaaatat

SEQ ID NO: 4615 - DNA, 120 bp, synthetic construct
  source 1..120: mol_type = other DNA
ctaacaaacaaaaaatacccaataaatacttattaaaataacaaaataaactctaatacttaatatacctaaaaaataaaactaaaatttcacccatcgaaaaaaacaaaaacatccaaa

SEQ ID NO: 4616 - DNA, 120 bp, synthetic construct
  source 1..120: mol_type = other DNA
ttgataagtagaaagtgtttaataaatatttgttgaaataataaaatgggttttgatgtttaatgtgtttgggaggtgaggttggagttttatttatcgagaaaagtagaaatatttaga

SEQ ID NO: 4617 - DNA, 120 bp, synthetic construct
  source 1..120: mol_type = other DNA
aaatctctaattttattttcttatattttcctaatctaatttttaatcaaaactataataacctcataatataaactaaaaactacaactctttaattttatataacaacttttaaaata

SEQ ID NO: 4618 - DNA, 120 bp, synthetic construct
  source 1..120: mol_type = other DNA
aaatttttaattttatttttttgtatttttttgatttgatttttaattaaggttatagtagttttataatatgagttgggagttataattttttaattttgtgtaataatttttagaata

SEQ ID NO: 4619 - DNA, 120 bp, synthetic construct
  source 1..120: mol_type = other DNA
aaataaatctctaattttattttcttatattttcctaatctaatttttaatcaaaactataataatataaactaaaaactacaactctttaattttatataacaacttttaaaataaaac

SEQ ID NO: 4620 - DNA, 120 bp, synthetic construct
  source 1..120: mol_type = other DNA
gaataaatttttaattttatttttttgtatttttttgatttgatttttaattaaggttataataatatgagttgggagttataattttttaattttgtgtaataatttttagaataaagt

SEQ ID NO: 4621 - DNA, 120 bp, synthetic construct; identical to SEQ ID NO: 4617
  source 1..120: mol_type = other DNA

SEQ ID NO: 4622 - DNA, 120 bp, synthetic construct; identical to SEQ ID NO: 4618
  source 1..120: mol_type = other DNA

SEQ ID NO: 4623 - DNA, 120 bp, synthetic construct; identical to SEQ ID NO: 4619
  source 1..120: mol_type = other DNA

SEQ ID NO: 4624 - DNA, 120 bp, synthetic construct; identical to SEQ ID NO: 4620
  source 1..120: mol_type = other DNA

SEQ ID NO: 4625 - DNA, 120 bp, synthetic construct
  source 1..120: mol_type = other DNA
actactcctatttaacaaataaaaaaactaaaactaaacaataaatttaaaatcaaactctacctctcctaaactatatccttaaacaaataactaatactctcaattaaatctattttc

SEQ ID NO: 4626 - DNA, 120 bp, synthetic construct
  source 1..120: mol_type = other DNA
gttgtttttgtttgataggtgagaggattgaggttgggtagtaggtttgaagttaggttttgttttttttgagttgtgtttttgggtgggtgattgatatttttaattgagtttgttttt

SEQ ID NO: 4627 - DNA, 120 bp, synthetic construct
  source 1..120: mol_type = other DNA
acccactactcctatttaacaaataaaaaaactaaaactaaacaataaatttaaaatcaaatcctaaactatatccttaaacaaataactaatactctcaattaaatctattttcccatt

SEQ ID NO: 4628 - DNA, 120 bp, synthetic construct
  source 1..120: mol_type = other DNA
atttgttgtttttgtttgataggtgagaggattgaggttgggtagtaggtttgaagttaggttttgagttgtgtttttgggtgggtgattgatatttttaattgagtttgtttttttatt

SEQ ID NO: 4629 - DNA, 120 bp, synthetic construct
  source 1..120: mol_type = other DNA
actactcctatttaacaaataaaaaaactaaaactaaacaataaatttaaaatcaaactctacctctcctaaactatatccttaaacgaataactaatactctcaattaaatctattttc

SEQ ID NO: 4630 - DNA, 120 bp, synthetic construct
  source 1..120: mol_type = other DNA
gttgtttttgtttgataggtgagaggattgaggttgggtagtaggtttgaagttaggttttgttttttttgagttgtgtttttgggcgggtgattgatatttttaattgagtttgttttt

SEQ ID NO: 4631 - DNA, 120 bp, synthetic construct
  source 1..120: mol_type = other DNA
acccgctactcctatttaacaaataaaaaaactaaaactaaacaataaatttaaaatcaaatcctaaactatatccttaaacgaataactaatactctcaattaaatctattttcccatt

SEQ ID NO: 4632 - DNA, 120 bp, synthetic construct
  source 1..120: mol_type = other DNA
attcgttgtttttgtttgataggtgagaggattgaggttgggtagtaggtttgaagttaggttttgagttgtgtttttgggcgggtgattgatatttttaattgagtttgtttttttatt

SEQ ID NO: 4633 - DNA, 120 bp, synthetic construct
  source 1..120: mol_type = other DNA
aaaactaatactattaatccaaaatccaaaactacttaatccttactactttaaataatactacttactctaaacaatcaaaaaattaatattctcataaattaaaaaatccctttaaat

SEQ ID NO: 4634 - DNA, 120 bp, synthetic construct
  source 1..120: mol_type = other DNA
gaaattgatgttgttagtttaaggtttaaagttatttggtttttgttattttgagtagtattgtttgttttaagtaattaagaagttaatgtttttatgaattaagaaatttttttgaat

SEQ ID NO: 4635 - DNA, 120 bp, synthetic construct
  source 1..120: mol_type = other DNA
ttataaaactaatactattaatccaaaatccaaaactacttaatccttactactttaaataactctaaacaatcaaaaaattaatattctcataaattaaaaaatccctttaaattataa

SEQ ID NO: 4636 - DNA, 120 bp, synthetic construct
  source 1..120: mol_type = other DNA
ttgtgaaattgatgttgttagtttaaggtttaaagttatttggtttttgttattttgagtagttttaagtaattaagaagttaatgtttttatgaattaagaaatttttttgaattgtag

SEQ ID NO: 4637 - DNA, 120 bp, synthetic construct; identical to SEQ ID NO: 4633
  source 1..120: mol_type = other DNA

SEQ ID NO: 4638 - DNA, 120 bp, synthetic construct; identical to SEQ ID NO: 4634
  source 1..120: mol_type = other DNA

SEQ ID NO: 4639 - DNA, 120 bp, synthetic construct; identical to SEQ ID NO: 4635
  source 1..120: mol_type = other DNA

SEQ ID NO: 4640 - DNA, 120 bp, synthetic construct; identical to SEQ ID NO: 4636
  source 1..120: mol_type = other DNA

SEQ ID NO: 4641 - DNA, 120 bp, synthetic construct
  source 1..120: mol_type = other DNA
ccattataactatacacaaaaataacaaaaaataaattattaaaacaaatataaaataaaaaatctcaacaaaaaaattaaaactattacaaataaaaattaaaaaactaaaatatatct

SEQ ID NO: 4642 - DNA, 120 bp, synthetic construct
  source 1..120: mol_type = other DNA
ttattataattgtgtgtaaggatagtaaggaatagattgttaaaataaatataagatagaaaattttagtagagaagttaaaattattataaatgaaaattagaaaattaaaatatattt

SEQ ID NO: 4643 - DNA, 120 bp, synthetic construct
  source 1..120: mol_type = other DNA
taaccattataactatacacaaaaataacaaaaaataaattattaaaacaaatataaaatatcaacaaaaaaattaaaactattacaaataaaaattaaaaaactaaaatatatctaaaa

SEQ ID NO: 4644 - DNA, 120 bp, synthetic construct
  source 1..120: mol_type = other DNA
tagttattataattgtgtgtaaggatagtaaggaatagattgttaaaataaatataagatattagtagagaagttaaaattattataaatgaaaattagaaaattaaaatatatttgaaa

SEQ ID NO: 4645 - DNA, 120 bp, synthetic construct
  source 1..120: mol_type = other DNA
ccattataactatacgcaaaaataacaaaaaataaattattaaaacaaatataaaataaaaaatctcaacaaaaaaattaaaactattacaaataaaaattaaaaaactaaaatatatct

SEQ ID NO: 4646 - DNA, 120 bp, synthetic construct
  source 1..120: mol_type = other DNA
ttattataattgtgcgtaaggatagtaaggaatagattgttaaaataaatataagatagaaaattttagtagagaagttaaaattattataaatgaaaattagaaaattaaaatatattt

SEQ ID NO: 4647 - DNA, 120 bp, synthetic construct
  source 1..120: mol_type = other DNA
taaccattataactatacgcaaaaataacaaaaaataaattattaaaacaaatataaaatatcaacaaaaaaattaaaactattacaaataaaaattaaaaaactaaaatatatctaaaa

SEQ ID NO: 4648 - DNA, 120 bp, synthetic construct
  source 1..120: mol_type = other DNA
tagttattataattgtgcgtaaggatagtaaggaatagattgttaaaataaatataagatattagtagagaagttaaaattattataaatgaaaattagaaaattaaaatatatttgaaa

SEQ ID NO: 4649 - DNA, 120 bp, synthetic construct
  source 1..120: mol_type = other DNA
aaaatatcaacctaaaaaaaaatttaaacataataaccatacaactaatatattcaaaacatcaactttctctatacatacaatatcataaccacctaataaattcaccttacctactac

SEQ ID NO: 4650 - DNA, 120 bp, synthetic construct
  source 1..120: mol_type = other DNA
gaagtgttaatttaaaggagaatttgaatatagtagttatgtaattgatgtgtttagaatattaattttttttgtatatgtaatgttataattatttagtgggtttattttgtttgttgt

SEQ ID NO: 4651 - DNA, 120 bp, synthetic construct
  source 1..120: mol_type = other DNA
taaaaaaatatcaacctaaaaaaaaatttaaacataataaccatacaactaatatattcaatttctctatacatacaatatcataaccacctaataaattcaccttacctactacctaaa

SEQ ID NO: 4652 - DNA, 120 bp, synthetic construct
  source 1..120: mol_type = other DNA
taaggaagtgttaatttaaaggagaatttgaatatagtagttatgtaattgatgtgtttagtttttttgtatatgtaatgttataattatttagtgggtttattttgtttgttgtttaga

SEQ ID NO: 4653 - DNA, 120 bp, synthetic construct; identical to SEQ ID NO: 4649
  source 1..120: mol_type = other DNA

SEQ ID NO: 4654 - DNA, 120 bp, synthetic construct; identical to SEQ ID NO: 4650
  source 1..120: mol_type = other DNA

SEQ ID NO: 4655 - DNA, 120 bp, synthetic construct; identical to SEQ ID NO: 4651
  source 1..120: mol_type = other DNA

SEQ ID NO: 4656 - DNA, 120 bp, synthetic construct; identical to SEQ ID NO: 4652
  source 1..120: mol_type = other DNA

SEQ ID NO: 4657 - DNA, 120 bp, synthetic construct
  source 1..120: mol_type = other DNA
aatatttattcaaaactatcactttctcttaacaaaaattaaattataataacttttaaatatttactaatctttaaaaattttcttactataaaaaaccaaccaataaaatcaaacaaa

SEQ ID NO: 4658 - DNA, 120 bp, synthetic construct
  source 1..120: mol_type = other DNA
aatatttgtttagagttattatttttttttggtagaaattaaattgtaatagtttttaaatgtttgttggtttttggagatttttttattgtggggaattagttagtaagattgagtagg

SEQ ID NO: 4659 - DNA, 120 bp, synthetic construct
  source 1..120: mol_type = other DNA
tttaatatttattcaaaactatcactttctcttaacaaaaattaaattataataacttttaactaatctttaaaaattttcttactataaaaaaccaaccaataaaatcaaacaaattct

SEQ ID NO: 4660 - DNA, 120 bp, synthetic construct
  source 1..120: mol_type = other DNA
tttaatatttgtttagagttattatttttttttggtagaaattaaattgtaatagtttttagttggtttttggagatttttttattgtggggaattagttagtaagattgagtaggtttt

SEQ ID NO: 4661 - DNA, 120 bp, synthetic construct
  source 1..120: mol_type = other DNA
aatatttattcaaaactatcactttctcttaacaaaaattaaattataataacttttaaatatttactaatctttaaaaattttcttactataaaaaaccaaccaataaaatcgaacaaa

SEQ ID NO: 4662 - DNA, 120 bp, synthetic construct
  source 1..120: mol_type = other DNA
aatatttgtttagagttattatttttttttggtagaaattaaattgtaatagtttttaaatgtttgttggtttttggagatttttttattgtggggaattagttagtaagatcgagtagg

SEQ ID NO: 4663 - DNA, 120 bp, synthetic construct
  source 1..120: mol_type = other DNA
tttaatatttattcaaaactatcactttctcttaacaaaaattaaattataataacttttaactaatctttaaaaattttcttactataaaaaaccaaccaataaaatcgaacaaattct

SEQ ID NO: 4664 - DNA, 120 bp, synthetic construct
  source 1..120: mol_type = other DNA
tttaatatttgtttagagttattatttttttttggtagaaattaaattgtaatagtttttagttggtttttggagatttttttattgtggggaattagttagtaagatcgagtaggtttt

SEQ ID NO: 4665 - DNA, 120 bp, synthetic construct
  source 1..120: mol_type = other DNA
cacacttctcccctccaaaacatcccaacactcacaacttccctaaaacttcaaaaccccaatatatctccaccctaacatactccaaaacttcctccctaaacctaaaaacccacccac

SEQ ID NO: 4666 - DNA, 120 bp, synthetic construct
  source 1..120: mol_type = other DNA
tatgttttttttttttagggtgttttagtatttgtagtttttttggggttttagagttttagtatgtttttattttgatatattttagaattttttttttgggtttggagatttatttgt

SEQ ID NO: 4667 - DNA, 120 bp, synthetic construct
  source 1..120: mol_type = other DNA
atccacacttctcccctccaaaacatcccaacactcacaacttccctaaaacttcaaaaccatctccaccctaacatactccaaaacttcctccctaaacctaaaaacccacccacctaa

SEQ ID NO: 4668 - DNA, 120 bp, synthetic construct
  source 1..120: mol_type = other DNA
gtttatgttttttttttttagggtgttttagtatttgtagtttttttggggttttagagttgtttttattttgatatattttagaattttttttttgggtttggagatttatttgtttgg

SEQ ID NO: 4669 - DNA, 120 bp, synthetic construct
  source 1..120: mol_type = other DNA
cacgcttctcccctccaaaacgtcccaacactcgcaacttccctaaaacttcaaaaccccaatatatctccaccctaacatactccaaaacttcctccctaaacctaaaaacccacccgc

SEQ ID NO: 4670 - DNA, 120 bp, synthetic construct
  source 1..120: mol_type = other DNA
tacgttttttttttttagggcgttttagtattcgtagtttttttggggttttagagttttagtatgtttttattttgatatattttagaattttttttttgggtttggagatttattcgt

SEQ ID NO: 4671 - DNA, 120 bp, synthetic construct
  source 1..120: mol_type = other DNA
atccacgcttctcccctccaaaacgtcccaacactcgcaacttccctaaaacttcaaaaccgtctccaccctaacatactccaaaacttcctccctaaacctaaaaacccacccgcctaa

SEQ ID NO: 4672 - DNA, 120 bp, synthetic construct
  source 1..120: mol_type = other DNA
gtttacgttttttttttttagggcgttttagtattcgtagtttttttggggttttagagtcgtttttattttgatatattttagaattttttttttgggtttggagatttattcgtttgg

SEQ ID NO: 4673 - DNA, 120 bp, synthetic construct
  source 1..120: mol_type = other DNA
ctttaataatcttcaccacaaccctataaaattaaaaataaaacacaaaaaactaaataactcacataaataataaacaataaaacaaaaattaacaccaaaactatctaacaccaatac

SEQ ID NO: 4674 - DNA, 120 bp, synthetic construct
  source 1..120: mol_type = other DNA
ttttgataatttttattataattttatgagattggaaatgaggtataggaagttaagtgatttatataagtagtaagtagtagagtaagaattgatattaaggttgtttggtattaatgt

SEQ ID NO: 4675 - DNA, 120 bp, synthetic construct
  source 1..120: mol_type = other DNA
ataatcttcaccacaaccctataaaattaaaaataaaacacaaaaaactaaataactaattcaaaatcacataaataataaacaataaaacaaaaattaacaccaaaactatctaacacc

SEQ ID NO: 4676 - DNA, 120 bp, synthetic construct
  source 1..120: mol_type = other DNA
ataatttttattataattttatgagattggaaatgaggtataggaagttaagtgattggtttaagattatataagtagtaagtagtagagtaagaattgatattaaggttgtttggtatt

SEQ ID NO: 4677 - DNA, 120 bp, synthetic construct; identical to SEQ ID NO: 4673
  source 1..120: mol_type = other DNA

SEQ ID NO: 4678 - DNA, 120 bp, synthetic construct; identical to SEQ ID NO: 4674
  source 1..120: mol_type = other DNA

SEQ ID NO: 4679 - DNA, 120 bp, synthetic construct; identical to SEQ ID NO: 4675
  source 1..120: mol_type = other DNA

SEQ ID NO: 4680 - DNA, 120 bp, synthetic construct; identical to SEQ ID NO: 4676
  source 1..120: mol_type = other DNA

SEQ ID NO: 4681 - DNA, 120 bp, synthetic construct
  source 1..120: mol_type = other DNA
taataaacaaaatatatatatcctaaaaatcttattaactatacctattttctttattttatcctattaatctccaataccaaataatccacaactatcctctcttaaaaaatcaaattc

SEQ ID NO: 4682 - DNA, 120 bp, synthetic construct
  source 1..120: mol_type = other DNA
taataaataaaatgtatatgttttgaagattttattgattgtatttgttttttttattttgttttgttagtttttagtgttagatagtttatagttgtttttttttggaaaattagattt

SEQ ID NO: 4683 - DNA, 120 bp, synthetic construct
  source 1..120: mol_type = other DNA
ttcttaataaacaaaatatatatatcctaaaaatcttattaactatacctattttctttatttaatctccaataccaaataatccacaactatcctctcttaaaaaatcaaattcatctt

SEQ ID NO: 4684 - DNA, 120 bp, synthetic construct
  source 1..120: mol_type = other DNA
tttttaataaataaaatgtatatgttttgaagattttattgattgtatttgttttttttatttagtttttagtgttagatagtttatagttgtttttttttggaaaattagatttatttt

SEQ ID NO: 4685 - DNA, 120 bp, synthetic construct; identical to SEQ ID NO: 4681
  source 1..120: mol_type = other DNA

SEQ ID NO: 4686 - DNA, 120 bp, synthetic construct; identical to SEQ ID NO: 4682
  source 1..120: mol_type = other DNA

SEQ ID NO: 4687 - DNA, 120 bp, synthetic construct; identical to SEQ ID NO: 4683
  source 1..120: mol_type = other DNA

SEQ ID NO: 4688 - DNA, 120 bp, synthetic construct; identical to SEQ ID NO: 4684
  source 1..120: mol_type = other DNA

SEQ ID NO: 4689 - DNA, 120 bp, synthetic construct
  source 1..120: mol_type = other DNA
caaatatacataaaaaaaaaataatataaatatacacaaaacaaaaaaaatcatatcttcacaaaacaaaaaaaaaaactaaactaaaactaccacaaaccaaaaaactcctaaaaccac

SEQ ID NO: 4690 - DNA, 120 bp, synthetic construct
  source 1..120: mol_type = other DNA
tagatgtgtatagagggaagatgatgtgaatgtatataaggtaaagaaaattatatttttataagataaagggagagattggattaggattgttataagttaaggagtttttggggttat

SEQ ID NO: 4691 - DNA, 120 bp, synthetic construct
  source 1..120: mol_type = other DNA
aaaaacaaatatacataaaaaaaaaataatataaatatacacaaaacaaaaaaaatcatatcaaaaaaaaaaactaaactaaaactaccacaaaccaaaaaactcctaaaaccaccaaaa

SEQ ID NO: 4692 - DNA, 120 bp, synthetic construct
  source 1..120: mol_type = other DNA
agagatagatgtgtatagagggaagatgatgtgaatgtatataaggtaaagaaaattatattaaagggagagattggattaggattgttataagttaaggagtttttggggttattagaa

SEQ ID NO: 4693 - DNA, 120 bp, synthetic construct; identical to SEQ ID NO: 4689
  source 1..120: mol_type = other DNA

SEQ ID NO: 4694 - DNA, 120 bp, synthetic construct; identical to SEQ ID NO: 4690
  source 1..120: mol_type = other DNA

SEQ ID NO: 4695 - DNA, 120 bp, synthetic construct; identical to SEQ ID NO: 4691
  source 1..120: mol_type = other DNA

SEQ ID NO: 4696 - DNA, 120 bp, synthetic construct; identical to SEQ ID NO: 4692
  source 1..120: mol_type = other DNA

SEQ ID NO: 4697 - DNA, 120 bp, synthetic construct
  source 1..120: mol_type = other DNA
ctctctctttctaaaaaaatacaaacatattcttaaaatcatcaaaaatttttatataaaacattttttaaaaaaatataaaaattaaaaaaaatatactttcttaaaactcaaaaattt

SEQ ID NO: 4698 - DNA, 120 bp, synthetic construct
  source 1..120: mol_type = other DNA
ttttttttttttaaagaaatgtagatatatttttgaaattattagaaatttttatgtgaagtattttttgaaaagatatgagaattaggaaaaatgtatttttttaaaatttaaaaattt

SEQ ID NO: 4699 - DNA, 120 bp, synthetic construct
  source 1..120: mol_type = other DNA
ctctttctaaaaaaatacaaacatattcttaaaatcatcaaaaatttttatataaaacaatctaacattttttaaaaaaatataaaaattaaaaaaaatatactttcttaaaactcaaaa

SEQ ID NO: 4700 - DNA, 120 bp, synthetic construct
  source 1..120: mol_type = other DNA
ttttttttaaagaaatgtagatatatttttgaaattattagaaatttttatgtgaagtagtttaatattttttgaaaagatatgagaattaggaaaaatgtatttttttaaaatttaaaa

SEQ ID NO: 4701 - DNA, 120 bp, synthetic construct; identical to SEQ ID NO: 4697
  source 1..120: mol_type = other DNA

SEQ ID NO: 4702 - DNA, 120 bp, synthetic construct; identical to SEQ ID NO: 4698
  source 1..120: mol_type = other DNA

SEQ ID NO: 4703 - DNA, 120 bp, synthetic construct; identical to SEQ ID NO: 4699
  source 1..120: mol_type = other DNA

SEQ ID NO: 4704 - DNA, 120 bp, synthetic construct; identical to SEQ ID NO: 4700
  source 1..120: mol_type = other DNA

SEQ ID NO: 4705 - DNA, 120 bp, synthetic construct
  source 1..120: mol_type = other DNA
tataattttaatataaattttaaaattaaatttatctaaataaaaatctcaaattaaaaaccctacttaattacttatcaaatatataacattcaactataaacttttctaaaccttaaa

SEQ ID NO: 4706 - DNA, 120 bp, synthetic construct
  source 1..120: mol_type = other DNA
tgtgattttaatgtgagttttgaagttgagtttatttaaatgaaaattttaggttgaaagttttgtttaattatttattaagtatatgatatttagttgtgaatttttttgaattttgag

SEQ ID NO: 4707 - DNA, 120 bp, synthetic construct
  source 1..120: mol_type = other DNA
actataattttaatataaattttaaaattaaatttatctaaataaaaatctcaaattaaaaacttaattacttatcaaatatataacattcaactataaacttttctaaaccttaaattt

SEQ ID NO: 4708 - DNA, 120 bp, synthetic construct
  source 1..120: mol_type = other DNA
attgtgattttaatgtgagttttgaagttgagtttatttaaatgaaaattttaggttgaaagtttaattatttattaagtatatgatatttagttgtgaatttttttgaattttgagttt

SEQ ID NO: 4709 - DNA, 120 bp, synthetic construct; identical to SEQ ID NO: 4705
  source 1..120: mol_type = other DNA

SEQ ID NO: 4710 - DNA, 120 bp, synthetic construct; identical to SEQ ID NO: 4706
  source 1..120: mol_type = other DNA

SEQ ID NO: 4711 - DNA, 120 bp, synthetic construct; identical to SEQ ID NO: 4707
  source 1..120: mol_type = other DNA

SEQ ID NO: 4712 - DNA, 120 bp, synthetic construct; identical to SEQ ID NO: 4708
  source 1..120: mol_type = other DNA

SEQ ID NO: 4713 - DNA, 120 bp, synthetic construct
  source 1..120: mol_type = other DNA
aaaaaaacaaattcttctcaaatataataaaacaatataaccaccaacaataaatataattcttcaaaatcccaccctctattaaaattcatattataacaccattttatttaaaaaaaa

SEQ ID NO: 4714 - DNA, 120 bp, synthetic construct
  source 1..120: mol_type = other DNA
ggaagaatgggttttttttagatgtaatgaggtggtatggttattagtagtgagtataattttttaaaattttattttttgttagagtttatgttgtgatattattttatttaaaagaag

SEQ ID NO: 4715 - DNA, 120 bp, synthetic construct
  source 1..120: mol_type = other DNA
acataaaaaaacaaattcttctcaaatataataaaacaatataaccaccaacaataaatataaaatcccaccctctattaaaattcatattataacaccattttatttaaaaaaaacaat

SEQ ID NO: 4716 - DNA, 120 bp, synthetic construct
  source 1..120: mol_type = other DNA
atatggaagaatgggttttttttagatgtaatgaggtggtatggttattagtagtgagtataaaattttattttttgttagagtttatgttgtgatattattttatttaaaagaagtaat

SEQ ID NO: 4717 - DNA, 120 bp, synthetic construct
  source 1..120: mol_type = other DNA
aaaaaaacgaattcttctcaaatataataaaacgatataaccaccaacaataaatataattcttcaaaatcccaccctctattaaaattcatattataacaccattttatttaaaaaaaa

SEQ ID NO: 4718 - DNA, 120 bp, synthetic construct
  source 1..120: mol_type = other DNA
ggaagaacgggttttttttagatgtaatgaggcggtatggttattagtagtgagtataattttttaaaattttattttttgttagagtttatgttgtgatattattttatttaaaagaag

SEQ ID NO: 4719 - DNA, 120 bp, synthetic construct
  source 1..120: mol_type = other DNA
acataaaaaaacgaattcttctcaaatataataaaacgatataaccaccaacaataaatataaaatcccaccctctattaaaattcatattataacaccattttatttaaaaaaaacaat

SEQ ID NO: 4720 - DNA, 120 bp, synthetic construct
  source 1..120: mol_type = other DNA
atatggaagaacgggttttttttagatgtaatgaggcggtatggttattagtagtgagtataaaattttattttttgttagagtttatgttgtgatattattttatttaaaagaagtaat

SEQ ID NO: 4721 - DNA, 120 bp, synthetic construct
  source 1..120: mol_type = other DNA
acaaacaaacattctcctaaaactttctaaaccattctaaatataacaatttcacacaaaacacaataacctccaactaactactacaaaccatatctaaatttttctcttttaaatacc

SEQ ID NO: 4722 - DNA, 120 bp, synthetic construct
  source 1..120: mol_type = other DNA
ataggtaggtatttttttaagattttttaaattattttaagtatgatagttttatataaaatatggtagtttttaattggttattataaattatatttagattttttttttttaagtatt

SEQ ID NO: 4723 - DNA, 120 bp, synthetic construct
  source 1..120: mol_type = other DNA
caaacattctcctaaaactttctaaaccattctaaatataacaatttcacacaaaacacaaaaaccacaataacctccaactaactactacaaaccatatctaaatttttctcttttaaa

SEQ ID NO: 4724 - DNA, 120 bp, synthetic construct
  source 1..120: mol_type = other DNA
taggtatttttttaagattttttaaattattttaagtatgatagttttatataaaatataggaattatggtagtttttaattggttattataaattatatttagattttttttttttaag

SEQ ID NO: 4725 - DNA, 120 bp, synthetic construct
  source 1..120: mol_type = other DNA
acaaacaaacattctcctaaaactttctaaaccattctaaatataacaatttcacacaaaacacgataacctccaactaactactacaaaccatatctaaatttttctcttttaaatacc

SEQ ID NO: 4726 - DNA, 120 bp, synthetic construct
  source 1..120: mol_type = other DNA
ataggtaggtatttttttaagattttttaaattattttaagtatgatagttttatataaaatacggtagtttttaattggttattataaattatatttagattttttttttttaagtatt

SEQ ID NO: 4727 - DNA, 120 bp, synthetic construct
  source 1..120: mol_type = other DNA
caaacattctcctaaaactttctaaaccattctaaatataacaatttcacacaaaacacaaaaaccacgataacctccaactaactactacaaaccatatctaaatttttctcttttaaa

SEQ ID NO: 4728 - DNA, 120 bp, synthetic construct
  source 1..120: mol_type = other DNA
taggtatttttttaagattttttaaattattttaagtatgatagttttatataaaatataggaattacggtagtttttaattggttattataaattatatttagattttttttttttaag

SEQ ID NO: 4729 - DNA, 120 bp, synthetic construct
  source 1..120: mol_type = other DNA
tcctaaaacaaaacccattccacactctcccataaaaacccccactaaaaaccccaaactaaaatacctaatcacaaaatataaccaaacccatcaaacactaaaaaaaaaaaaaaaacc

SEQ ID NO: 4730 - DNA, 120 bp, synthetic construct
  source 1..120: mol_type = other DNA
ttttaaggtagagtttattttatatttttttatgaaagtttttgttgaggattttaggttggggtgtttgattatgggatataattgggtttgttaggtattaggaaaagggaagaggtt

SEQ ID NO: 4731 - DNA, 120 bp, synthetic construct
  source 1..120: mol_type = other DNA
aaacaaaacccattccacactctcccataaaaacccccactaaaaaccccaaactaaattaccctaaaatacctaatcacaaaatataaccaaacccatcaaacactaaaaaaaaaaaaa

SEQ ID NO: 4732 - DNA, 120 bp, synthetic construct
  source 1..120: mol_type = other DNA
aggtagagtttattttatatttttttatgaaagtttttgttgaggattttaggttgggttattttagggtgtttgattatgggatataattgggtttgttaggtattaggaaaagggaag

SEQ ID NO: 4733 - DNA, 120 bp, synthetic construct
  source 1..120: mol_type = other DNA
tcctaaaacaaaacccattccacactctcccataaaaacccccgctaaaaaccccaaactaaaatacctaatcacgaaatataaccgaacccgtcaaacactaaaaaaaaaaaaaaaacc

SEQ ID NO: 4734 - DNA, 120 bp, synthetic construct
  source 1..120: mol_type = other DNA
ttttaaggtagagtttattttatatttttttatgaaagttttcgttgaggattttaggttggggtgtttgattacgggatataatcgggttcgttaggtattaggaaaagggaagaggtt

SEQ ID NO: 4735 - DNA, 120 bp, synthetic construct
  source 1..120: mol_type = other DNA
aaacaaaacccattccacactctcccataaaaacccccgctaaaaaccccaaactaaattaccctaaaatacctaatcacgaaatataaccgaacccgtcaaacactaaaaaaaaaaaaa

SEQ ID NO: 4736 - DNA, 120 bp, synthetic construct
  source 1..120: mol_type = other DNA
aggtagagtttattttatatttttttatgaaagttttcgttgaggattttaggttgggttattttagggtgtttgattacgggatataatcgggttcgttaggtattaggaaaagggaag

SEQ ID NO: 4737 - DNA, 120 bp, synthetic construct
  source 1..120: mol_type = other DNA
tataaaaattaaacaaaaaaattaaacaaccatcaatacaattattttacatcaataacccctcaaaactaaatatttacaaataaatctaccatactttaattaaaaattctttcaaaa

SEQ ID NO: 4738 - DNA, 120 bp, synthetic construct
  source 1..120: mol_type = other DNA
tgtaaaaattaaataaaaaagttaaataattattaatataattgttttatattaatggttttttaaggttaaatatttataggtgaatttgttatgttttaattgaagatttttttaaaa

SEQ ID NO: 4739 - DNA, 120 bp, synthetic construct
  source 1..120: mol_type = other DNA
ataactataaaaattaaacaaaaaaattaaacaaccatcaatacaattattttacatcaataactaaatatttacaaataaatctaccatactttaattaaaaattctttcaaaacctta

SEQ ID NO: 4740 - DNA, 120 bp, synthetic construct
  source 1..120: mol_type = other DNA
gtaattgtaaaaattaaataaaaaagttaaataattattaatataattgttttatattaatggttaaatatttataggtgaatttgttatgttttaattgaagatttttttaaaatttta

SEQ ID NO: 4741 - DNA, 120 bp, synthetic construct; identical to SEQ ID NO: 4737
  source 1..120: mol_type = other DNA

SEQ ID NO: 4742 - DNA, 120 bp, synthetic construct; identical to SEQ ID NO: 4738
  source 1..120: mol_type = other DNA

SEQ ID NO: 4743 - DNA, 120 bp, synthetic construct; identical to SEQ ID NO: 4739
  source 1..120: mol_type = other DNA

SEQ ID NO: 4744 - DNA, 120 bp, synthetic construct; identical to SEQ ID NO: 4740
  source 1..120: mol_type = other DNA

SEQ ID NO: 4745 - DNA, 120 bp, synthetic construct
  source 1..120: mol_type = other DNA
ctaaatcacacccactataacttaatcctctctaaacccaaatcccaattatactattttataactctctcccatcctaacctactcccaaaacaaaacacaaattttataaaccaaaaa

SEQ ID NO: 4746 - DNA, 120 bp, synthetic construct
  source 1..120: mol_type = other DNA
ttgagttatgtttattgtaatttggttttttttgaatttaggttttagttgtgttattttgtgatttttttttattttgatttatttttagaataggatatagattttataaattaaagg

SEQ ID NO: 4747 - DNA, 120 bp, synthetic construct
  source 1..120: mol_type = other DNA
accactaaatcacacccactataacttaatcctctctaaacccaaatcccaattatactattctctcccatcctaacctactcccaaaacaaaacacaaattttataaaccaaaaactac

SEQ ID NO: 4748 - DNA, 120 bp, synthetic construct
  source 1..120: mol_type = other DNA
gttattgagttatgtttattgtaatttggttttttttgaatttaggttttagttgtgttatttttttttattttgatttatttttagaataggatatagattttataaattaaaggttgt

SEQ ID NO: 4749 - DNA, 120 bp, synthetic construct
  source 1..120: mol_type = other DNA
ctaaatcacgcccactataacttaatcctctctaaacccaaatcccaattatactattttataactctctcccatcctaacctactcccaaaacaaaacacaaattttataaaccaaaaa

SEQ ID NO: 4750 - DNA, 120 bp, synthetic construct
  source 1..120: mol_type = other DNA
ttgagttacgtttattgtaatttggttttttttgaatttaggttttagttgtgttattttgtgatttttttttattttgatttatttttagaataggatatagattttataaattaaagg

SEQ ID NO: 4751 - DNA, 120 bp, synthetic construct
  source 1..120: mol_type = other DNA
accactaaatcacgcccactataacttaatcctctctaaacccaaatcccaattatactattctctcccatcctaacctactcccaaaacaaaacacaaattttataaaccaaaaactac

SEQ ID NO: 4752 - DNA, 120 bp, synthetic construct
  source 1..120: mol_type = other DNA
gttattgagttacgtttattgtaatttggttttttttgaatttaggttttagttgtgttatttttttttattttgatttatttttagaataggatatagattttataaattaaaggttgt

SEQ ID NO: 4753 - DNA, 120 bp, synthetic construct
  source 1..120: mol_type = other DNA
ccaatacaaacaaaaaccaaaaccaaacaaataaaaaacactactaatcacaactctcttcctaaaaaaaaaaaaaataaaaattaaactatactctaaactaactcctaatcctacctc

SEQ ID NO: 4754 - DNA, 120 bp, synthetic construct
  source 1..120: mol_type = other DNA
ttagtgtaaataggaattaaggttaagtgaataagggatgttgttggttatagttttttttttggagaaaagaaaagtgaaagttaaattatgttttgagttggtttttgattttgtttt

SEQ ID NO: 4755 - DNA, 120 bp, synthetic construct
  source 1..120: mol_type = other DNA
acaaacaaaaaccaaaaccaaacaaataaaaaacactactaatcacaactctcttcctaactcctctaaaaaaaaaaaaaataaaaattaaactatactctaaactaactcctaatccta

SEQ ID NO: 4756 - DNA, 120 bp, synthetic construct
  source 1..120: mol_type = other DNA
gtaaataggaattaaggttaagtgaataagggatgttgttggttatagttttttttttggtttttttggagaaaagaaaagtgaaagttaaattatgttttgagttggtttttgattttg

SEQ ID NO: 4757 - DNA, 120 bp, synthetic construct
  source 1..120: mol_type = other DNA
ccaatacaaacaaaaaccaaaaccaaacgaataaaaaacgctactaatcacaactctcttcctaaaaaaaaaaaaaataaaaattaaactatactctaaactaactcctaatcctacctc

SEQ ID NO: 4758 - DNA, 120 bp, synthetic construct
  source 1..120: mol_type = other DNA
ttagtgtaaataggaattaaggttaagcgaataagggacgttgttggttatagttttttttttggagaaaagaaaagtgaaagttaaattatgttttgagttggtttttgattttgtttt

SEQ ID NO: 4759 - DNA, 120 bp, synthetic construct
  source 1..120: mol_type = other DNA
acaaacaaaaaccaaaaccaaacgaataaaaaacgctactaatcacaactctcttcctaactcctctaaaaaaaaaaaaaataaaaattaaactatactctaaactaactcctaatccta

SEQ ID NO: 4760 - DNA, 120 bp, synthetic construct
  source 1..120: mol_type = other DNA
gtaaataggaattaaggttaagcgaataagggacgttgttggttatagttttttttttggtttttttggagaaaagaaaagtgaaagttaaattatgttttgagttggtttttgattttg

SEQ ID NO: 4761 - DNA, 120 bp, synthetic construct
  source 1..120: mol_type = other DNA
taaaaaacaacacccaaactaaaatcccaacaaaatctttaatacaacaaattaacatatccacttaaaaattacaatttaaaatttataataaataaaaatatttaaaatatttataat

SEQ ID NO: 4762 - DNA, 120 bp, synthetic construct
  source 1..120: mol_type = other DNA
taaaaagtaatgtttagattaaaattttaatagaatttttggtatagtaagttaatatatttatttaaggattgtaatttggaatttgtagtaaataaaagtatttgaaatatttataat

SEQ ID NO: 4763 - DNA, 120 bp, synthetic construct
  source 1..120: mol_type = other DNA
cacataaaaaacaacacccaaactaaaatcccaacaaaatctttaatacaacaaattaacataaaaattacaatttaaaatttataataaataaaaatatttaaaatatttataattata

SEQ ID NO: 4764 - DNA, 120 bp, synthetic construct
  source 1..120: mol_type = other DNA
tatataaaaagtaatgtttagattaaaattttaatagaatttttggtatagtaagttaatataaggattgtaatttggaatttgtagtaaataaaagtatttgaaatatttataattata

SEQ ID NO: 4765 - DNA, 120 bp, synthetic construct
  source 1..120: mol_type = other DNA
taaaaaacaacgcccaaactaaaatcccaacaaaatctttaatacaacaaattaacatatccacttaaaaattacaatttaaaatttataataaataaaaatatttaaaatatttataat

SEQ ID NO: 4766 - DNA, 120 bp, synthetic construct
  source 1..120: mol_type = other DNA
taaaaagtaacgtttagattaaaattttaatagaatttttggtatagtaagttaatatatttatttaaggattgtaatttggaatttgtagtaaataaaagtatttgaaatatttataat

SEQ ID NO: 4767 - DNA, 120 bp, synthetic construct
  source 1..120: mol_type = other DNA
cacataaaaaacaacgcccaaactaaaatcccaacaaaatctttaatacaacaaattaacataaaaattacaatttaaaatttataataaataaaaatatttaaaatatttataattata

SEQ ID NO: 4768 - DNA, 120 bp, synthetic construct
  source 1..120: mol_type = other DNA
tatataaaaagtaacgtttagattaaaattttaatagaatttttggtatagtaagttaatataaggattgtaatttggaatttgtagtaaataaaagtatttgaaatatttataattata

SEQ ID NO: 4769 - DNA, 120 bp, synthetic construct
  source 1..120: mol_type = other DNA
aaaaaaaaaaaaaaaaaaaaacaaaataaaaactaaatcaaactaacaaacaataaataataaccaaccccaaaaaattcaataaaaaaatcaaaactcaaaaactaaacaacctaatac

SEQ ID NO: 4770 - DNA, 120 bp, synthetic construct
  source 1..120: mol_type = other DNA
aaggaggaggaagagagaaaatagaatggaaattgaattaggttggtaggtagtgggtaatgattaattttgaagagtttggtggaagagttggagtttaggaattagatgatttggtat

SEQ ID NO: 4771 - DNA, 120 bp, synthetic construct
  source 1..120: mol_type = other DNA
aaaaaaaaaaaaaaaacaaaataaaaactaaatcaaactaacaaacaataaataataacctaaccaaaccaaccccaaaaaattcaataaaaaaatcaaaactcaaaaactaaacaacct

SEQ ID NO: 4772 - DNA, 120 bp, synthetic construct
  source 1..120: mol_type = other DNA
ggaggaagagagaaaatagaatggaaattgaattaggttggtaggtagtgggtaatgatttggttggattaattttgaagagtttggtggaagagttggagtttaggaattagatgattt

SEQ ID NO: 4773 - DNA, 120 bp, synthetic construct
  source 1..120: mol_type = other DNA
aaaaaaaaaaaaaaaaaaaaacaaaataaaaactaaatcaaactaacaaacaataaataataaccaaccccgaaaaattcgataaaaaaatcgaaactcaaaaactaaacgacctaatac

SEQ ID NO: 4774 - DNA, 120 bp, synthetic construct
  source 1..120: mol_type = other DNA
aaggaggaggaagagagaaaatagaatggaaattgaattaggttggtaggtagtgggtaatgattaatttcgaagagttcggtggaagagtcggagtttaggaattagacgatttggtat

SEQ ID NO: 4775 - DNA, 120 bp, synthetic construct
  source 1..120: mol_type = other DNA
aaaaaaaaaaaaaaaacaaaataaaaactaaatcaaactaacaaacaataaataataacctaaccgaaccaaccccgaaaaattcgataaaaaaatcgaaactcaaaaactaaacgacct

SEQ ID NO: 4776 - DNA, 120 bp, synthetic construct
  source 1..120: mol_type = other DNA
ggaggaagagagaaaatagaatggaaattgaattaggttggtaggtagtgggtaatgatttggtcggattaatttcgaagagttcggtggaagagtcggagtttaggaattagacgattt

SEQ ID NO: 4777 - DNA, 120 bp, synthetic construct
  source 1..120: mol_type = other DNA
taataacttcaaataaaaaatatacctcataaactaaatatttatcatcaaaaaccactaaaaatatactaccaaaactccccctccccctacaaatctactactaatccatcttaccta

SEQ ID NO: 4778 - DNA, 120 bp, synthetic construct
  source 1..120: mol_type = other DNA
taatagttttaaataggaggtgtgttttataaattaagtatttattattagaggttattggggatgtgttgttaaagttttttttttttttgtaaatttattgttaatttattttgtttg

SEQ ID NO: 4779 - DNA, 120 bp, synthetic construct
  source 1..120: mol_type = other DNA
taataataacttcaaataaaaaatatacctcataaactaaatatttatcatcaaaaaccactatactaccaaaactccccctccccctacaaatctactactaatccatcttacctaact

SEQ ID NO: 4780 - DNA, 120 bp, synthetic construct
  source 1..120: mol_type = other DNA
tgataatagttttaaataggaggtgtgttttataaattaagtatttattattagaggttattgtgttgttaaagttttttttttttttgtaaatttattgttaatttattttgtttgatt

SEQ ID NO: 4781 - DNA, 120 bp, synthetic construct; identical to SEQ ID NO: 4777
  source 1..120: mol_type = other DNA

SEQ ID NO: 4782 - DNA, 120 bp, synthetic construct; identical to SEQ ID NO: 4778
  source 1..120: mol_type = other DNA

SEQ ID NO: 4783 - DNA, 120 bp, synthetic construct; identical to SEQ ID NO: 4779
  source 1..120: mol_type = other DNA

SEQ ID NO: 4784 - DNA, 120 bp, synthetic construct; identical to SEQ ID NO: 4780
  source 1..120: mol_type = other DNA

SEQ ID NO: 4785 - DNA, 120 bp, synthetic construct
  source 1..120: mol_type = other DNA
atatttttccctacattacacatcctaaaaacaaccatattttcccaaaaatatccttttaaatcaacaaccactttacaaaattttaaatcaacaaaataaaaaacttctcaaatctca

SEQ ID NO: 4786 - DNA, 120 bp, synthetic construct
  source 1..120: mol_type = other DNA
atatttttttttgtattatatattttaggagtaattatatttttttaaagatatttttttgaattaataattgttttataaaattttaaattagtaggatgaggagttttttaagtttta

SEQ ID NO: 4787 - DNA, 120 bp, synthetic construct
  source 1..120: mol_type = other DNA
tttccctacattacacatcctaaaaacaaccatattttcccaaaaatatccttttaaatataaacaatcaacaaccactttacaaaattttaaatcaacaaaataaaaaacttctcaaat

SEQ ID NO: 4788 - DNA, 120 bp, synthetic construct
  source 1..120: mol_type = other DNA
tttttttgtattatatattttaggagtaattatatttttttaaagatatttttttgaatatgaataattaataattgttttataaaattttaaattagtaggatgaggagttttttaagt

SEQ ID NO: 4789 - DNA, 120 bp, synthetic construct
  source 1..120: mol_type = other DNA
atatttttccctacattacacatcctaaaaacaaccatattttcccaaaaatatccttttaaatcaacaaccgctttacaaaattttaaatcaacaaaataaaaaacttctcaaatctca

SEQ ID NO: 4790 - DNA, 120 bp, synthetic construct
  source 1..120: mol_type = other DNA
atatttttttttgtattatatattttaggagtaattatatttttttaaagatatttttttgaattaataatcgttttataaaattttaaattagtaggatgaggagttttttaagtttta

SEQ ID NO: 4791 - DNA, 120 bp, synthetic construct
  source 1..120: mol_type = other DNA
tttccctacattacacatcctaaaaacaaccatattttcccaaaaatatccttttaaatataaacaatcaacaaccgctttacaaaattttaaatcaacaaaataaaaaacttctcaaat

SEQ ID NO: 4792 - DNA, 120 bp, synthetic construct
  source 1..120: mol_type = other DNA
tttttttgtattatatattttaggagtaattatatttttttaaagatatttttttgaatatgaataattaataatcgttttataaaattttaaattagtaggatgaggagttttttaagt

SEQ ID NO: 4793 - DNA, 120 bp, synthetic construct
  source 1..120: mol_type = other DNA
atctctaccaaactaccccatctaaaaacaaaactaaaaacccaacaacaaaaaaaaaaaaaccccatattctaaaaactccatataaaaattaataacattaatactatctaaccaaaa

SEQ ID NO: 4794 - DNA, 120 bp, synthetic construct
  source 1..120: mol_type = other DNA
gtttttgttaggttgttttatttgagggtagaattgagagtttagtggtagaaggaaagaaattttatgttttgggagttttatgtgggaattggtggtattggtgttgtttgattagag

SEQ ID NO: 4795 - DNA, 120 bp, synthetic construct
  source 1..120: mol_type = other DNA
ctaccaaactaccccatctaaaaacaaaactaaaaacccaacaacaaaaaaaaaaaaactccctcaccccatattctaaaaactccatataaaaattaataacattaatactatctaacc

SEQ ID NO: 4796 - DNA, 120 bp, synthetic construct
  source 1..120: mol_type = other DNA
ttgttaggttgttttatttgagggtagaattgagagtttagtggtagaaggaaagaaatttttttattttatgttttgggagttttatgtgggaattggtggtattggtgttgtttgatt

SEQ ID NO: 4797 - DNA, 120 bp, synthetic construct
  source 1..120: mol_type = other DNA
atctctaccaaactaccccatctaaaaacaaaactaaaaacccaacgacaaaaaaaaaaaaaccccatattctaaaaactccatataaaaattaataacattaatactatctaaccaaaa

SEQ ID NO: 4798 - DNA, 120 bp, synthetic construct
  source 1..120: mol_type = other DNA
gtttttgttaggttgttttatttgagggtagaattgagagtttagcggtagaaggaaagaaattttatgttttgggagttttatgtgggaattggtggtattggtgttgtttgattagag

SEQ ID NO: 4799 - DNA, 120 bp, synthetic construct
  source 1..120: mol_type = other DNA
ctaccaaactaccccatctaaaaacaaaactaaaaacccaacgacaaaaaaaaaaaaactccctcaccccatattctaaaaactccatataaaaattaataacattaatactatctaacc

SEQ ID NO: 4800 - DNA, 120 bp, synthetic construct
  source 1..120: mol_type = other DNA
ttgttaggttgttttatttgagggtagaattgagagtttagcggtagaaggaaagaaatttttttattttatgttttgggagttttatgtgggaattggtggtattggtgttgtttgatt

SEQ ID NO: 4801 - DNA, 120 bp, synthetic construct
  source 1..120: mol_type = other DNA
aactctaaaatacattttcttcatatctattttctatattttaaaaataaaatactttaatatatcactataatcataaattccaatccaaaattcctctaaaaaaccaccttatcttac

SEQ ID NO: 4802 - DNA, 120 bp, synthetic construct
  source 1..120: mol_type = other DNA
aattttaaaatatattttttttgtgtttgttttttatattttaaaaatgaagtattttgatatgttattatggttataagttttagtttaaagtttttttaaagaattattttattttat

SEQ ID NO: 4803 - DNA, 120 bp, synthetic construct
  source 1..120: mol_type = other DNA
ctaaaatacattttcttcatatctattttctatattttaaaaataaaatactttaatatatattcatatcactataatcataaattccaatccaaaattcctctaaaaaaccaccttatc

SEQ ID NO: 4804 - DNA, 120 bp, synthetic construct
  source 1..120: mol_type = other DNA
ttaaaatatattttttttgtgtttgttttttatattttaaaaatgaagtattttgatatgtatttatgttattatggttataagttttagtttaaagtttttttaaagaattattttatt

SEQ ID NO: 4805 - DNA, 120 bp, synthetic construct
  source 1..120: mol_type = other DNA
aactctaaaatacattttcttcgtatctattttctatattttaaaaataaaatactttaatatatcactataatcataaattccaatccaaaattcctctaaaaaaccaccttatcttac

SEQ ID NO: 4806 - DNA, 120 bp, synthetic construct
  source 1..120: mol_type = other DNA
aattttaaaatatatttttttcgtgtttgttttttatattttaaaaatgaagtattttgatatgttattatggttataagttttagtttaaagtttttttaaagaattattttattttat

SEQ ID NO: 4807 - DNA, 120 bp, synthetic construct
  source 1..120: mol_type = other DNA
ctaaaatacattttcttcgtatctattttctatattttaaaaataaaatactttaatatatattcatatcactataatcataaattccaatccaaaattcctctaaaaaaccaccttatc

SEQ ID NO: 4808 - DNA, 120 bp, synthetic construct
  source 1..120: mol_type = other DNA
ttaaaatatatttttttcgtgtttgttttttatattttaaaaatgaagtattttgatatgtatttatgttattatggttataagttttagtttaaagtttttttaaagaattattttatt

SEQ ID NO: 4809 - DNA, 120 bp, synthetic construct
  source 1..120: mol_type = other DNA
acttttatcaaaattaaacaataaaaatcacccacataatacacaaaaaaaaataaaaataacaatattaacatcattattaactttaaataacctataacaaaaaacaaatactaaaat

SEQ ID NO: 4810 - DNA, 120 bp, synthetic construct
  source 1..120: mol_type = other DNA
gtttttattagggttgggtagtagaaattatttatatggtatataaagaaaaatgggggtgatagtgttggtattgttgttagttttgggtaatttgtggtggggagtagatattgagat

SEQ ID NO: 4811 - DNA, 120 bp, synthetic construct
  source 1..120: mol_type = other DNA
ccctaacttttatcaaaattaaacaataaaaatcacccacataatacacaaaaaaaaataaattaacatcattattaactttaaataacctataacaaaaaacaaatactaaaatttaaa

SEQ ID NO: 4812 - DNA, 120 bp, synthetic construct
  source 1..120: mol_type = other DNA
ttttagtttttattagggttgggtagtagaaattatttatatggtatataaagaaaaatgggttggtattgttgttagttttgggtaatttgtggtggggagtagatattgagatttaag

SEQ ID NO: 4813 - DNA, 120 bp, synthetic construct
  source 1..120: mol_type = other DNA
acttttatcaaaattaaacaataaaaatcacccacataatacacaaaaaaaaataaaaataacaatattaacatcgttattaactttaaataacctataacgaaaaacaaatactaaaat

SEQ ID NO: 4814 - DNA, 120 bp, synthetic construct
  source 1..120: mol_type = other DNA
gtttttattagggttgggtagtagaaattatttatatggtatataaagaaaaatgggggtgatagtgttggtatcgttgttagttttgggtaatttgtggcggggagtagatattgagat

SEQ ID NO: 4815 - DNA, 120 bp, synthetic construct
  source 1..120: mol_type = other DNA
ccctaacttttatcaaaattaaacaataaaaatcacccacataatacacaaaaaaaaataaattaacatcgttattaactttaaataacctataacgaaaaacaaatactaaaatttaaa

SEQ ID NO: 4816 - DNA, 120 bp, synthetic construct
  source 1..120: mol_type = other DNA
ttttagtttttattagggttgggtagtagaaattatttatatggtatataaagaaaaatgggttggtatcgttgttagttttgggtaatttgtggcggggagtagatattgagatttaag

SEQ ID NO: 4817 - DNA, 120 bp, synthetic construct
  source 1..120: mol_type = other DNA
tcaaataatcctaacatatccacctatcattactccaaccctctactactattattttacaaaaatacttctcctttttattcaaaaatcccttaaaaaattaccacattccctacttac

SEQ ID NO: 4818 - DNA, 120 bp, synthetic construct
  source 1..120: mol_type = other DNA
ttagataattttagtatgtttatttgttattgttttgattttttgttattgttgttttgtaagaatgttttttttttttgtttaagggttttttgagaaattgttatattttttgtttgt

SEQ ID NO: 4819 - DNA, 120 bp, synthetic construct
  source 1..120: mol_type = other DNA
tttctcaaataatcctaacatatccacctatcattactccaaccctctactactattattttacttctcctttttattcaaaaatcccttaaaaaattaccacattccctacttactttc

SEQ ID NO: 4820 - DNA, 120 bp, synthetic construct
  source 1..120: mol_type = other DNA
ttttttagataattttagtatgtttatttgttattgttttgattttttgttattgttgttttgttttttttttttgtttaagggttttttgagaaattgttatattttttgtttgttttt

SEQ ID NO: 4821 - DNA, 120 bp, synthetic construct
  source 1..120: mol_type = other DNA
tcaaataatcctaacatatccacctatcattactccgaccctctactactattattttacaaaaatacttctcctttttattcaaaaatcccttaaaaaattaccacattccctacttac

SEQ ID NO: 4822 - DNA, 120 bp, synthetic construct
  source 1..120: mol_type = other DNA
ttagataattttagtatgtttatttgttattgtttcgattttttgttattgttgttttgtaagaatgttttttttttttgtttaagggttttttgagaaattgttatattttttgtttgt

SEQ ID NO: 4823 - DNA, 120 bp, synthetic construct
  source 1..120: mol_type = other DNA
tttctcaaataatcctaacatatccacctatcattactccgaccctctactactattattttacttctcctttttattcaaaaatcccttaaaaaattaccacattccctacttactttc

SEQ ID NO: 4824 - DNA, 120 bp, synthetic construct
  source 1..120: mol_type = other DNA
ttttttagataattttagtatgtttatttgttattgtttcgattttttgttattgttgttttgttttttttttttgtttaagggttttttgagaaattgttatattttttgtttgttttt

SEQ ID NO: 4825 - DNA, 120 bp, synthetic construct
  source 1..120: mol_type = other DNA
actcaataaaaccctaaaaaaaaaacatcccttttctcaaacctcctaaaattaatttaacccaacttaacttaaatacaaacaaaaaacccttaacacaaacaaaactataaaacataa

SEQ ID NO: 4826 - DNA, 120 bp, synthetic construct
  source 1..120: mol_type = other DNA
gtttagtgaggttttggaaaaagagtatttttttttttaaattttttagggttgatttggtttagtttggtttgggtgtgggtagggaatttttggtgtaggtagagttgtggagtgtgg

SEQ ID NO: 4827 - DNA, 120 bp, synthetic construct
  source 1..120: mol_type = other DNA
ctacaactcaataaaaccctaaaaaaaaaacatcccttttctcaaacctcctaaaattaatttaacttaaatacaaacaaaaaacccttaacacaaacaaaactataaaacataataata

SEQ ID NO: 4828 - DNA, 120 bp, synthetic construct
  source 1..120: mol_type = other DNA
ttatagtttagtgaggttttggaaaaagagtatttttttttttaaattttttagggttgatttggtttgggtgtgggtagggaatttttggtgtaggtagagttgtggagtgtggtgatg

SEQ ID NO: 4829 - DNA, 120 bp, synthetic construct
  source 1..120: mol_type = other DNA
actcaataaaaccctaaaaaaaaaacatcccttttctcaaacctcctaaaattaatttaacccaacttaacttaaatacgaacaaaaaacccttaacgcaaacaaaactataaaacgtaa

SEQ ID NO: 4830 - DNA, 120 bp, synthetic construct
  source 1..120: mol_type = other DNA
gtttagtgaggttttggaaaaagagtatttttttttttaaattttttagggttgatttggtttagtttggtttgggtgcgggtagggaatttttggcgtaggtagagttgtggagcgtgg

SEQ ID NO: 4831 - DNA, 120 bp, synthetic construct
  source 1..120: mol_type = other DNA
ctacaactcaataaaaccctaaaaaaaaaacatcccttttctcaaacctcctaaaattaatttaacttaaatacgaacaaaaaacccttaacgcaaacaaaactataaaacgtaataata

SEQ ID NO: 4832 - DNA, 120 bp, synthetic construct
  source 1..120: mol_type = other DNA
ttatagtttagtgaggttttggaaaaagagtatttttttttttaaattttttagggttgatttggtttgggtgcgggtagggaatttttggcgtaggtagagttgtggagcgtggtgatg

SEQ ID NO: 4833 - DNA, 120 bp, synthetic construct
  source 1..120: mol_type = other DNA
ttattatccaataaaaattatcaaaaaaattccttacacaataatcatcataattcaaaaacaaccaaaaacatatataatacacacctaccttaaaaccaaacctcaaaaaaaaatatc

SEQ ID NO: 4834 - DNA, 120 bp, synthetic construct
  source 1..120: mol_type = other DNA
ttattatttaataagagttgttaaaaaggttttttgtgtagtggttgttatagtttagaagtgattgggagtgtgtgtggtgtgtgtttgttttgaggttaggttttagagaagggtgtt

SEQ ID NO: 4835 - DNA, 120 bp, synthetic construct
  source 1..120: mol_type = other DNA
ttatccaataaaaattatcaaaaaaattccttacacaataatcatcataattcaaaaacaataacaaccaaaaacatatataatacacacctaccttaaaaccaaacctcaaaaaaaaat

SEQ ID NO: 4836 - DNA, 120 bp, synthetic construct
  source 1..120: mol_type = other DNA
ttatttaataagagttgttaaaaaggttttttgtgtagtggttgttatagtttagaagtgatgatgattgggagtgtgtgtggtgtgtgtttgttttgaggttaggttttagagaagggt

SEQ ID NO: 4837 - DNA, 120 bp, synthetic construct
  source 1..120: mol_type = other DNA
ttattatccaataaaaattatcaaaaaaattccttacgcaataatcgtcataattcaaaaacgaccgaaaacgtatataatacgcgcctaccttaaaaccaaacctcaaaaaaaaatatc

SEQ ID NO: 4838 - DNA, 120 bp, synthetic construct
  source 1..120: mol_type = other DNA
ttattatttaataagagttgttaaaaaggttttttgcgtagtggtcgttatagtttagaagcgatcgggagcgtgtgtggtgcgcgtttgttttgaggttaggttttagagaagggtgtt

SEQ ID NO: 4839 - DNA, 120 bp, synthetic construct
  source 1..120: mol_type = other DNA
ttatccaataaaaattatcaaaaaaattccttacgcaataatcgtcataattcaaaaacgataacgaccgaaaacgtatataatacgcgcctaccttaaaaccaaacctcaaaaaaaaat

SEQ ID NO: 4840 - DNA, 120 bp, synthetic construct
  source 1..120: mol_type = other DNA
ttatttaataagagttgttaaaaaggttttttgcgtagtggtcgttatagtttagaagcgatgacgatcgggagcgtgtgtggtgcgcgtttgttttgaggttaggttttagagaagggt

SEQ ID NO: 4841 - DNA, 120 bp, synthetic construct
  source 1..120: mol_type = other DNA
tattattctcaaattatcaatttttattcattttattaaaaaataacaacttaactcttaaattatcttaaatatacccacttatatccaaaaaattcctctattatttcaacatatact

SEQ ID NO: 4842 - DNA, 120 bp, synthetic construct
  source 1..120: mol_type = other DNA
tgttatttttagattattaatttttatttattttattgaaaaatagtaatttaatttttagattgttttaaatatatttatttgtgtttagaaagtttttttgttattttaatatatgtt

SEQ ID NO: 4843 - DNA, 120 bp, synthetic construct
  source 1..120: mol_type = other DNA
ttctcaaattatcaatttttattcattttattaaaaaataacaacttaactcttaaattatattacattatcttaaatatacccacttatatccaaaaaattcctctattatttcaacat

SEQ ID NO: 4844 - DNA, 120 bp, synthetic construct
  source 1..120: mol_type = other DNA
tttttagattattaatttttatttattttattgaaaaatagtaatttaatttttagattatattatattgttttaaatatatttatttgtgtttagaaagtttttttgttattttaatat

SEQ ID NO: 4845 - DNA, 120 bp, synthetic construct; identical to SEQ ID NO: 4841
  source 1..120: mol_type = other DNA

SEQ ID NO: 4846 - DNA, 120 bp, synthetic construct; identical to SEQ ID NO: 4842
  source 1..120: mol_type = other DNA

SEQ ID NO: 4847 - DNA, 120 bp, synthetic construct; identical to SEQ ID NO: 4843
  source 1..120: mol_type = other DNA

SEQ ID NO: 4848 - DNA, 120 bp, synthetic construct; identical to SEQ ID NO: 4844
  source 1..120: mol_type = other DNA

SEQ ID NO: 4849 - DNA, 120 bp, synthetic construct
  source 1..120: mol_type = other DNA
aataaacctaaaaaaactaactaacacatttaaaataatcaaaaaaaacatctaaactataaatctataacattaaataataaaccttaccctaaatcaataattctaaatcaaaaataa

SEQ ID NO: 4850 - DNA, 120 bp, synthetic construct
  source 1..120: mol_type = other DNA
aataagtttaaagaagttggttaatatatttgaaatagttaagaagaatatttgaattatggatttgtaatattgaatgataaattttgttttaaattaatggttttaaattaggggtga

SEQ ID NO: 4851 - DNA, 120 bp, synthetic construct
  source 1..120: mol_type = other DNA
aaacctaaaaaaactaactaacacatttaaaataatcaaaaaaaacatctaaactataaatttcaatctataacattaaataataaaccttaccctaaatcaataattctaaatcaaaaa

SEQ ID NO: 4852 - DNA, 120 bp, synthetic construct
  source 1..120: mol_type = other DNA
aagtttaaagaagttggttaatatatttgaaatagttaagaagaatatttgaattatgggttttgatttgtaatattgaatgataaattttgttttaaattaatggttttaaattagggg

SEQ ID NO: 4853 - DNA, 120 bp, synthetic construct; identical to SEQ ID NO: 4849
  source 1..120: mol_type = other DNA

SEQ ID NO: 4854 - DNA, 120 bp, synthetic construct; identical to SEQ ID NO: 4850
  source 1..120: mol_type = other DNA

SEQ ID NO: 4855 - DNA, 120 bp, synthetic construct
  source 1..120: mol_type = other DNA
aaacctaaaaaaactaactaacacatttaaaataatcaaaaaaaacatctaaactataaatttcgatctataacattaaataataaaccttaccctaaatcaataattctaaatcaaaaa

SEQ ID NO: 4856 - DNA, 120 bp, synthetic construct
  source 1..120: mol_type = other DNA
aagtttaaagaagttggttaatatatttgaaatagttaagaagaatatttgaattatgggtttcgatttgtaatattgaatgataaattttgttttaaattaatggttttaaattagggg

SEQ ID NO: 4857 - DNA, 120 bp, synthetic construct
  source 1..120: mol_type = other DNA
aacaaaaaactaaatttctaattttatttcaaattctataactcactaaatattacataaaatttactatattaaataaaaataattcttattcttaataaaaaaaacacataaaattct

SEQ ID NO: 4858 - DNA, 120 bp, synthetic construct
  source 1..120: mol_type = other DNA
agtaaaaaattaaatttttgattttattttagattttatagtttattgaatattgtataaaatttattgtattagatggaaatgatttttgtttttagtggaggaagtatatgaagtttt

SEQ ID NO: 4859 - DNA, 120 bp, synthetic construct
  source 1..120: mol_type = other DNA
aaaactaaatttctaattttatttcaaattctataactcactaaatattacataaaatacattttatttactatattaaataaaaataattcttattcttaataaaaaaaacacataaaa

SEQ ID NO: 4860 - DNA, 120 bp, synthetic construct
  source 1..120: mol_type = other DNA
aaaattaaatttttgattttattttagattttatagtttattgaatattgtataaaatgtattttatttattgtattagatggaaatgatttttgtttttagtggaggaagtatatgaag

SEQ ID NO: 4861 - DNA, 120 bp, synthetic construct; identical to SEQ ID NO: 4857
  source 1..120: mol_type = other DNA

SEQ ID NO: 4862 - DNA, 120 bp, synthetic construct; identical to SEQ ID NO: 4858
  source 1..120: mol_type = other DNA

SEQ ID NO: 4863 - DNA, 120 bp, synthetic construct; identical to SEQ ID NO: 4859
  source 1..120: mol_type = other DNA

SEQ ID NO: 4864 - DNA, 120 bp, synthetic construct; identical to SEQ ID NO: 4860
  source 1..120: mol_type = other DNA

SEQ ID NO: 4865 - DNA, 120 bp, synthetic construct
  source 1..120: mol_type = other DNA
tcacctcatacacaaaatatctataaatatcccaattctattaaaactattatttaactttacaacaccatttaacactattaatcactcctccctcttacaaatactcttaacttcata

SEQ ID NO: 4866 - DNA, 120 bp, synthetic construct
  source 1..120: mol_type = other DNA
ttattttatgtatagaatgtttatgaatgttttagttttgttaaagttgttatttaattttgtagtattatttgatattgttgattattttttttttttgtaaatgtttttggttttatg

SEQ ID NO: 4867 - DNA, 120 bp, synthetic construct
  source 1..120: mol_type = other DNA
tttactcacctcatacacaaaatatctataaatatcccaattctattaaaactattatttaaccatttaacactattaatcactcctccctcttacaaatactcttaacttcatatccac

SEQ ID NO: 4868 - DNA, 120 bp, synthetic construct
  source 1..120: mol_type = other DNA
tttatttattttatgtatagaatgtttatgaatgttttagttttgttaaagttgttatttaattatttgatattgttgattattttttttttttgtaaatgtttttggttttatgtttat

SEQ ID NO: 4869 - DNA, 120 bp, synthetic construct; identical to SEQ ID NO: 4865
  source 1..120: mol_type = other DNA

SEQ ID NO: 4870 - DNA, 120 bp, synthetic construct; identical to SEQ ID NO: 4866
  source 1..120: mol_type = other DNA

SEQ ID NO: 4871 - DNA, 120 bp, synthetic construct; identical to SEQ ID NO: 4867
  source 1..120: mol_type = other DNA

SEQ ID NO: 4872 - DNA, 120 bp, synthetic construct; identical to SEQ ID NO: 4868
  source 1..120: mol_type = other DNA

SEQ ID NO: 4873 - DNA, 120 bp, synthetic construct
  source 1..120: mol_type = other DNA
atttttaaaataaatttctatcaaaatttaacataaatacaaaaaaataaataattcataaaaatactattcaataaattattaaaaaataaaaacaactatatactaaatacccacatc

SEQ ID NO: 4874 - DNA, 120 bp, synthetic construct
  source 1..120: mol_type = other DNA
atttttaaagtaaatttttattaaaatttaatataggtgtaaaaaagtgaataatttataagggtattgtttagtgaattgttaaaaggtaaaggtagttgtgtattgagtatttatgtt

SEQ ID NO: 4875 - DNA, 120 bp, synthetic construct
  source 1..120: mol_type = other DNA
taatcatttttaaaataaatttctatcaaaatttaacataaatacaaaaaaataaataattctattcaataaattattaaaaaataaaaacaactatatactaaatacccacatcaaaaa

SEQ ID NO: 4876 - DNA, 120 bp, synthetic construct
  source 1..120: mol_type = other DNA
tagttatttttaaagtaaatttttattaaaatttaatataggtgtaaaaaagtgaataattttgtttagtgaattgttaaaaggtaaaggtagttgtgtattgagtatttatgttagaaa

SEQ ID NO: 4877 - DNA, 120 bp, synthetic construct
  source 1..120: mol_type = other DNA
atttttaaaataaatttctatcaaaatttaacataaatacaaaaaaataaataattcataaaaatactattcaataaattattaaaaaataaaaacaactatatactaaatacccacgtc

SEQ ID NO: 4878 - DNA, 120 bp, synthetic construct
  source 1..120: mol_type = other DNA
atttttaaagtaaatttttattaaaatttaatataggtgtaaaaaagtgaataatttataagggtattgtttagtgaattgttaaaaggtaaaggtagttgtgtattgagtatttacgtt

SEQ ID NO: 4879 - DNA, 120 bp, synthetic construct
  source 1..120: mol_type = other DNA
taatcatttttaaaataaatttctatcaaaatttaacataaatacaaaaaaataaataattctattcaataaattattaaaaaataaaaacaactatatactaaatacccacgtcaaaaa

SEQ ID NO: 4880 - DNA, 120 bp, synthetic construct
  source 1..120: mol_type = other DNA
tagttatttttaaagtaaatttttattaaaatttaatataggtgtaaaaaagtgaataattttgtttagtgaattgttaaaaggtaaaggtagttgtgtattgagtatttacgttagaaa

SEQ ID NO: 4881 - DNA, 120 bp, synthetic construct
  source 1..120: mol_type = other DNA
aaaaatattttaaactataataacaaaaataaataaataaccatacctttctaaaaaaaattattccttacaaccattaaacctattactacaaataactaaaaaaaaaaaacaaatcaa

SEQ ID NO: 4882 - DNA, 120 bp, synthetic construct
  source 1..120: mol_type = other DNA
aagaatgttttgggttatgatggtagaaatggatggatgattatgtttttttggaagagattattttttgtaattattggatttattattgtaaatagttgagaaaaaggaataaattag

SEQ ID NO: 4883 - DNA, 120 bp, synthetic construct
  source 1..120: mol_type = other DNA
atattttaaactataataacaaaaataaataaataaccatacctttctaaaaaaaattaaaaaaatattccttacaaccattaaacctattactacaaataactaaaaaaaaaaaacaaa

SEQ ID NO: 4884 - DNA, 120 bp, synthetic construct
  source 1..120: mol_type = other DNA
atgttttgggttatgatggtagaaatggatggatgattatgtttttttggaagagattgagagaatattttttgtaattattggatttattattgtaaatagttgagaaaaaggaataaa

SEQ ID NO: 4885 - DNA, 120 bp, synthetic construct; identical to SEQ ID NO: 4881
  source 1..120: mol_type = other DNA

SEQ ID NO: 4886 - DNA, 120 bp, synthetic construct; identical to SEQ ID NO: 4882
  source 1..120: mol_type = other DNA

SEQ ID NO: 4887 - DNA, 120 bp, synthetic construct; identical to SEQ ID NO: 4883
  source 1..120: mol_type = other DNA

SEQ ID NO: 4888 - DNA, 120 bp, synthetic construct; identical to SEQ ID NO: 4884
  source 1..120: mol_type = other DNA

SEQ ID NO: 4889 - DNA, 120 bp, synthetic construct
  source 1..120: mol_type = other DNA
accacaccaaatccaacacccacaacaacaacaaaaaccatttctaaaacaactttaaaaatatacttatccttccaaataaaaaaaacttaaaaaaacccctaaacaaaaaaaaaaaaa

SEQ ID NO: 4890 - DNA, 120 bp, synthetic construct
  source 1..120: mol_type = other DNA
gttatattaggtttggtatttatggtagtagtaggagttatttttgggataattttggggatatatttgtttttttaagtgaaaggagtttaaaaagatttttgagtaggagagaaaaag

SEQ ID NO: 4891 - DNA, 120 bp, synthetic construct
  source 1..120: mol_type = other DNA
accaaatccaacacccacaacaacaacaaaaaccatttctaaaacaactttaaaaattatctccactatacttatccttccaaataaaaaaaacttaaaaaaacccctaaacaaaaaaaa

SEQ ID NO: 4892 - DNA, 120 bp, synthetic construct
  source 1..120: mol_type = other DNA
attaggtttggtatttatggtagtagtaggagttatttttgggataattttggggattatttttattatatttgtttttttaagtgaaaggagtttaaaaagatttttgagtaggagaga

SEQ ID NO: 4893 - DNA, 120 bp, synthetic construct
  source 1..120: mol_type = other DNA
accacaccaaatccgacacccacgacaacaacaaaaaccatttctaaaacaactttaaaaatatacttatccttccaaataaaaaaaacttaaaaaaacccctaaacaaaaaaaaaaaaa

SEQ ID NO: 4894 - DNA, 120 bp, synthetic construct
  source 1..120: mol_type = other DNA
gttatattaggttcggtatttacggtagtagtaggagttatttttgggataattttggggatatatttgtttttttaagtgaaaggagtttaaaaagatttttgagtaggagagaaaaag

SEQ ID NO: 4895 - DNA, 120 bp, synthetic construct
  source 1..120: mol_type = other DNA
accaaatccgacacccacgacaacaacaaaaaccatttctaaaacaactttaaaaattatctccactatacttatccttccaaataaaaaaaacttaaaaaaacccctaaacaaaaaaaa

SEQ ID NO: 4896 - DNA, 120 bp, synthetic construct
  source 1..120: mol_type = other DNA
attaggttcggtatttacggtagtagtaggagttatttttgggataattttggggattatttttattatatttgtttttttaagtgaaaggagtttaaaaagatttttgagtaggagaga

SEQ ID NO: 4897 - DNA, 120 bp, synthetic construct
  source 1..120: mol_type = other DNA
aatactaatccaaaacaaatacacttcaactaccattccttacctaatatatacttatcttaaaacacccttcttatatacctttctaaaataaaaatatattttaccctattaataaaa

SEQ ID NO: 4898 - DNA, 120 bp, synthetic construct
  source 1..120: mol_type = other DNA
aatgttggtttagggtagatgtattttagttattgttttttgtttggtgtgtgtttgttttgaagtattttttttatgtgtttttttggaatgggaatgtgttttgttttattggtgaag

SEQ ID NO: 4899 - DNA, 120 bp, synthetic construct
  source 1..120: mol_type = other DNA
taatccaaaacaaatacacttcaactaccattccttacctaatatatacttatcttaaaaattaaaaaacacccttcttatatacctttctaaaataaaaatatattttaccctattaat

SEQ ID NO: 4900 - DNA, 120 bp, synthetic construct
  source 1..120: mol_type = other DNA
tggtttagggtagatgtattttagttattgttttttgtttggtgtgtgtttgttttgagggttgagaagtattttttttatgtgtttttttggaatgggaatgtgttttgttttattggt

SEQ ID NO: 4901 - DNA, 120 bp, synthetic construct
  source 1..120: mol_type = other DNA
aatactaatccaaaacaaatacacttcaactaccgttccttacctaatatatacttatcttaaaacacccttcttatatacctttctaaaataaaaatatattttaccctattaataaaa

SEQ ID NO: 4902 - DNA, 120 bp, synthetic construct
  source 1..120: mol_type = other DNA
aatgttggtttagggtagatgtattttagttatcgttttttgtttggtgtgtgtttgttttgaagtattttttttatgtgtttttttggaatgggaatgtgttttgttttattggtgaag

SEQ ID NO: 4903 - DNA, 120 bp, synthetic construct
  source 1..120: mol_type = other DNA
taatccaaaacaaatacacttcaactaccgttccttacctaatatatacttatcttaaaaattaaaaaacacccttcttatatacctttctaaaataaaaatatattttaccctattaat

SEQ ID NO: 4904 - DNA, 120 bp, synthetic construct
  source 1..120: mol_type = other DNA
tggtttagggtagatgtattttagttatcgttttttgtttggtgtgtgtttgttttgagggttgagaagtattttttttatgtgtttttttggaatgggaatgtgttttgttttattggt

SEQ ID NO: 4905 - DNA, 120 bp, synthetic construct
  source 1..120: mol_type = other DNA
acaaaacactaaaaacctaataatatttaaaaaccaatctataaatactataacaaactaactttacaatacccaaaattaaataaaattaactaacaaacttcccttctatttatttct

SEQ ID NO: 4906 - DNA, 120 bp, synthetic construct
  source 1..120: mol_type = other DNA
ataaagtattaagaatttgatagtatttaggaattagtttataaatattatgatagattggttttataatatttaggattggataaaattgattaataaattttttttttgtttattttt

SEQ ID NO: 4907 - DNA, 120 bp, synthetic construct
  source 1..120: mol_type = other DNA
acactaaaaacctaataatatttaaaaaccaatctataaatactataacaaactaaaaaaaatctctttacaatacccaaaattaaataaaattaactaacaaacttcccttctatttat

SEQ ID NO: 4908 - DNA, 120 bp, synthetic construct
  source 1..120: mol_type = other DNA
gtattaagaatttgatagtatttaggaattagtttataaatattatgatagattggggaaagtttttttataatatttaggattggataaaattgattaataaattttttttttgtttat

SEQ ID NO: 4909 - DNA, 120 bp, synthetic construct; identical to SEQ ID NO: 4905
  source 1..120: mol_type = other DNA

SEQ ID NO: 4910 - DNA, 120 bp, synthetic construct; identical to SEQ ID NO: 4906
  source 1..120: mol_type = other DNA

SEQ ID NO: 4911 - DNA, 120 bp, synthetic construct; identical to SEQ ID NO: 4907
  source 1..120: mol_type = other DNA

SEQ ID NO: 4912 - DNA, 120 bp, synthetic construct; identical to SEQ ID NO: 4908
  source 1..120: mol_type = other DNA

SEQ ID NO: 4913 - DNA, 120 bp, synthetic construct
  source 1..120: mol_type = other DNA
aaatactaaaaacaccattcactttatacaataaaaataatatatttaaaataacacctatatattccctaaaattctccaaaaaaacaaaaccaataaaattaattataaaaattaact

SEQ ID NO: 4914 - DNA, 120 bp, synthetic construct
  source 1..120: mol_type = other DNA
aagtattagagatattatttattttatgtagtaaaaatagtatatttgggatagtatttgtgtattttttggggttttttagagaaatagaattaataggattgattatggaaattggtt

SEQ ID NO: 4915 - DNA, 120 bp, synthetic construct
  source 1..120: mol_type = other DNA
aaaacaaatactaaaaacaccattcactttatacaataaaaataatatatttaaaataacaccctaaaattctccaaaaaaacaaaaccaataaaattaattataaaaattaactcataa

SEQ ID NO: 4916 - DNA, 120 bp, synthetic construct
  source 1..120: mol_type = other DNA
aaaataagtattagagatattatttattttatgtagtaaaaatagtatatttgggatagtattttggggttttttagagaaatagaattaataggattgattatggaaattggtttatga

SEQ ID NO: 4917 - DNA, 120 bp, synthetic construct; identical to SEQ ID NO: 4913
  source 1..120: mol_type = other DNA

SEQ ID NO: 4918 - DNA, 120 bp, synthetic construct; identical to SEQ ID NO: 4914
  source 1..120: mol_type = other DNA

SEQ ID NO: 4919 - DNA, 120 bp, synthetic construct; identical to SEQ ID NO: 4915
  source 1..120: mol_type = other DNA

SEQ ID NO: 4920 - DNA, 120 bp, synthetic construct; identical to SEQ ID NO: 4916
  source 1..120: mol_type = other DNA

SEQ ID NO: 4921 - DNA, 120 bp, synthetic construct
  source 1..120: mol_type = other DNA
tcctactttaacatcctattaaactcataaccccaaaacactaactaatttctaacctaatctaaataattaccccatatacacttatcttacactaaaaactccaataattaactatcc

SEQ ID NO: 4922 - DNA, 120 bp, synthetic construct
  source 1..120: mol_type = other DNA
ttttgttttaatattttgttaggtttataattttaaggtattgattggtttttaatttggtttgagtggttgttttgtgtgtgtttgttttgtattgagagttttagtgattggttgttt

SEQ ID NO: 4923 - DNA, 120 bp, synthetic construct
  source 1..120: mol_type = other DNA
attttcctactttaacatcctattaaactcataaccccaaaacactaactaatttctaacctaattaccccatatacacttatcttacactaaaaactccaataattaactatcctaaaa

SEQ ID NO: 4924 - DNA, 120 bp, synthetic construct
  source 1..120: mol_type = other DNA
atttttttgttttaatattttgttaggtttataattttaaggtattgattggtttttaatttggttgttttgtgtgtgtttgttttgtattgagagttttagtgattggttgttttggga

SEQ ID NO: 4925 - DNA, 120 bp, synthetic construct
  source 1..120: mol_type = other DNA
tcctactttaacatcctattaaactcataaccccaaaacactaactaatttctaacctaatctaaataattaccccgtatacgcttatcttacactaaaaactccaataattaactatcc

SEQ ID NO: 4926 - DNA, 120 bp, synthetic construct
  source 1..120: mol_type = other DNA
ttttgttttaatattttgttaggtttataattttaaggtattgattggtttttaatttggtttgagtggttgtttcgtgtgcgtttgttttgtattgagagttttagtgattggttgttt

SEQ ID NO: 4927 - DNA, 120 bp, synthetic construct
  source 1..120: mol_type = other DNA
attttcctactttaacatcctattaaactcataaccccaaaacactaactaatttctaacctaattaccccgtatacgcttatcttacactaaaaactccaataattaactatcctaaaa

SEQ ID NO: 4928 - DNA, 120 bp, synthetic construct
  source 1..120: mol_type = other DNA
atttttttgttttaatattttgttaggtttataattttaaggtattgattggtttttaatttggttgtttcgtgtgcgtttgttttgtattgagagttttagtgattggttgttttggga

SEQ ID NO: 4929 - DNA, 120 bp, synthetic construct
  source 1..120: mol_type = other DNA
ttttaactttcttaaatactttctaaaaaaattccttaactttatcttctctacattctaataaattctttccacaacattctatttttattttataaaacactatcctcttaaactcta

SEQ ID NO: 4930 - DNA, 120 bp, synthetic construct
  source 1..120: mol_type = other DNA
ttttggtttttttgggtattttttgagagagttttttgattttattttttttgtattttggtgagttttttttataatattttatttttgttttatgaggtattgtttttttgaatttta

SEQ ID NO: 4931 - DNA, 120 bp, synthetic construct
  source 1..120: mol_type = other DNA
aactttcttaaatactttctaaaaaaattccttaactttatcttctctacattctaataaaattttaaattctttccacaacattctatttttattttataaaacactatcctcttaaac

SEQ ID NO: 4932 - DNA, 120 bp, synthetic construct
  source 1..120: mol_type = other DNA
ggtttttttgggtattttttgagagagttttttgattttattttttttgtattttggtgaaattttgagttttttttataatattttatttttgttttatgaggtattgtttttttgaat

SEQ ID NO: 4933 - DNA, 120 bp, synthetic construct; identical to SEQ ID NO: 4929
  source 1..120: mol_type = other DNA

SEQ ID NO: 4934 - DNA, 120 bp, synthetic construct; identical to SEQ ID NO: 4930
  source 1..120: mol_type = other DNA

SEQ ID NO: 4935 - DNA, 120 bp, synthetic construct; identical to SEQ ID NO: 4931
  source 1..120: mol_type = other DNA

SEQ ID NO: 4936 - DNA, 120 bp, synthetic construct; identical to SEQ ID NO: 4932
  source 1..120: mol_type = other DNA

SEQ ID NO: 4937 - DNA, 120 bp, synthetic construct
  source 1..120: mol_type = other DNA
aaatactacttataacataaaccttaataataaaaacttttaaacctaacctaataaataactacatatacttctactcctccaaataaaactaatttttctcctctaaatttaatataa

SEQ ID NO: 4938 - DNA, 120 bp, synthetic construct
  source 1..120: mol_type = other DNA
aggtgttgtttatgatatagattttgatgatgagggtttttaggtttggtttggtgaataattatatatgtttttgtttttttgaatgaaattaattttttttttttgagtttgatgtgg

SEQ ID NO: 4939 - DNA, 120 bp, synthetic construct
  source 1..120: mol_type = other DNA
taaaaaatactacttataacataaaccttaataataaaaacttttaaacctaacctaataaatatacttctactcctccaaataaaactaatttttctcctctaaatttaatataattta

SEQ ID NO: 4940 - DNA, 120 bp, synthetic construct
  source 1..120: mol_type = other DNA
taagaggtgttgtttatgatatagattttgatgatgagggtttttaggtttggtttggtgaatatgtttttgtttttttgaatgaaattaattttttttttttgagtttgatgtggtttg

SEQ ID NO: 4941 - DNA, 120 bp, synthetic construct
  source 1..120: mol_type = other DNA
aaatactacttataacataaaccttaataataaaaacttttaaacctaacctaataaataactacatatacttctactcctccgaataaaactaatttttctcctctaaatttaatataa

SEQ ID NO: 4942 - DNA, 120 bp, synthetic construct
  source 1..120: mol_type = other DNA
aggtgttgtttatgatatagattttgatgatgagggtttttaggtttggtttggtgaataattatatatgtttttgttttttcgaatgaaattaattttttttttttgagtttgatgtgg

SEQ ID NO: 4943 - DNA, 120 bp, synthetic construct
  source 1..120: mol_type = other DNA
taaaaaatactacttataacataaaccttaataataaaaacttttaaacctaacctaataaatatacttctactcctccgaataaaactaatttttctcctctaaatttaatataattta

SEQ ID NO: 4944 - DNA, 120 bp, synthetic construct
  source 1..120: mol_type = other DNA
taagaggtgttgtttatgatatagattttgatgatgagggtttttaggtttggtttggtgaatatgtttttgttttttcgaatgaaattaattttttttttttgagtttgatgtggtttg

SEQ ID NO: 4945 - DNA, 120 bp, synthetic construct
  source 1..120: mol_type = other DNA
ccccaaattacctaaattctcaaactcctctacacctaaaactaataaaccaacccataaactaaacctaactaatatatacaaaacctacacatatctacataacctaaattaaaattt

SEQ ID NO: 4946 - DNA, 120 bp, synthetic construct
  source 1..120: mol_type = other DNA
ttttgagttgtttgggtttttaggtttttttgtatttggagttagtgagttagtttatgggttgaatttggttggtgtgtatagagtttgtatatgtttgtatagtttaggttgaggttt

SEQ ID NO: 4947 - DNA, 120 bp, synthetic construct
  source 1..120: mol_type = other DNA
accctccccaaattacctaaattctcaaactcctctacacctaaaactaataaaccaaccccctaactaatatatacaaaacctacacatatctacataacctaaattaaaatttaaaca

SEQ ID NO: 4948 - DNA, 120 bp, synthetic construct
  source 1..120: mol_type = other DNA
attttttttgagttgtttgggtttttaggtttttttgtatttggagttagtgagttagttttttggttggtgtgtatagagtttgtatatgtttgtatagtttaggttgaggtttggata

SEQ ID NO: 4949 - DNA, 120 bp, synthetic construct
  source 1..120: mol_type = other DNA
ccccgaattacctaaattctcaaactcctctacacctaaaactaataaaccaacccataaactaaacctaactaatatatacaaaacctacacatatctacataacctaaattaaaattt

SEQ ID NO: 4950 - DNA, 120 bp, synthetic construct
  source 1..120: mol_type = other DNA
tttcgagttgtttgggtttttaggtttttttgtatttggagttagtgagttagtttatgggttgaatttggttggtgtgtatagagtttgtatatgtttgtatagtttaggttgaggttt

SEQ ID NO: 4951 - DNA, 120 bp, synthetic construct
  source 1..120: mol_type = other DNA
accctccccgaattacctaaattctcaaactcctctacacctaaaactaataaaccaaccccctaactaatatatacaaaacctacacatatctacataacctaaattaaaatttaaaca

SEQ ID NO: 4952 - DNA, 120 bp, synthetic construct
  source 1..120: mol_type = other DNA
atttttttcgagttgtttgggtttttaggtttttttgtatttggagttagtgagttagttttttggttggtgtgtatagagtttgtatatgtttgtatagtttaggttgaggtttggata

SEQ ID NO: 4953 - DNA, 120 bp, synthetic construct
  source 1..120: mol_type = other DNA
acaacaatatatctaataaaaaattaaaaataaataaaactacattcaataaaaaaatatttcactattactttcaaaataaatatctcatactattcaaacataaaatattttaaacaa

SEQ ID NO: 4954 - DNA, 120 bp, synthetic construct
  source 1..120: mol_type = other DNA
atagtaatatatttgatgaggaattaagggtgggtaaagttgtatttagtgaaggagtgttttattgttatttttaagataaatgttttatgttatttagatatggaatattttaaatag

SEQ ID NO: 4955 - DNA, 120 bp, synthetic construct
  source 1..120: mol_type = other DNA
caatatatctaataaaaaattaaaaataaataaaactacattcaataaaaaaatatttctttaactcactattactttcaaaataaatatctcatactattcaaacataaaatattttaa

SEQ ID NO: 4956 - DNA, 120 bp, synthetic construct
  source 1..120: mol_type = other DNA
taatatatttgatgaggaattaagggtgggtaaagttgtatttagtgaaggagtgtttttttggtttattgttatttttaagataaatgttttatgttatttagatatggaatattttaa

SEQ ID NO: 4957 - DNA, 120 bp, synthetic construct; identical to SEQ ID NO: 4953
  source 1..120: mol_type = other DNA

SEQ ID NO: 4958 - DNA, 120 bp, synthetic construct; identical to SEQ ID NO: 4954
  source 1..120: mol_type = other DNA

SEQ ID NO: 4959 - DNA, 120 bp, synthetic construct; identical to SEQ ID NO: 4955
  source 1..120: mol_type = other DNA

SEQ ID NO: 4960 - DNA, 120 bp, synthetic construct; identical to SEQ ID NO: 4956
  source 1..120: mol_type = other DNA

SEQ ID NO: 4961 - DNA, 120 bp, synthetic construct
  source 1..120: mol_type = other DNA
acaattaacaaatttttaaaatatctacacactcacatacacacatacacaatttctatccatttttattaaattttataaaaaaataaatttataatacaaccctactctaataccttt

SEQ ID NO: 4962 - DNA, 120 bp, synthetic construct
  source 1..120: mol_type = other DNA
gtagttgataaatttttgagatgtttgtatatttatatatatatatatataatttttgtttatttttgttaggttttatgggagagtgggtttgtaatgtagttttattttaatgttttt

SEQ ID NO: 4963 - DNA, 120 bp, synthetic construct
  source 1..120: mol_type = other DNA
actatacaattaacaaatttttaaaatatctacacactcacatacacacatacacaatttctattaaattttataaaaaaataaatttataatacaaccctactctaatacctttcacct

SEQ ID NO: 4964 - DNA, 120 bp, synthetic construct
  source 1..120: mol_type = other DNA
gttgtgtagttgataaatttttgagatgtttgtatatttatatatatatatatataatttttgttaggttttatgggagagtgggtttgtaatgtagttttattttaatgttttttattt

SEQ ID NO: 4965 - DNA, 120 bp, synthetic construct; identical to SEQ ID NO: 4961
  source 1..120: mol_type = other DNA

SEQ ID NO: 4966 - DNA, 120 bp, synthetic construct; identical to SEQ ID NO: 4962
  source 1..120: mol_type = other DNA

SEQ ID NO: 4967 - DNA, 120 bp, synthetic construct; identical to SEQ ID NO: 4963
  source 1..120: mol_type = other DNA

SEQ ID NO: 4968 - DNA, 120 bp, synthetic construct; identical to SEQ ID NO: 4964
  source 1..120: mol_type = other DNA

SEQ ID NO: 4969 - DNA, 120 bp, synthetic construct
  source 1..120: mol_type = other DNA
aaaaaataacaaacaatccatctataactataaaactatctacttcctcacctttttaaaaatatacaaacattatactttcctaaaaacaaaccatttctacaaccaaaaaaaaaaaca

SEQ ID NO: 4970 - DNA, 120 bp, synthetic construct
  source 1..120: mol_type = other DNA
aaaaaatggtaaataatttatttatgattataaaattatttgtttttttatttttttgaaaatatgtaagtattatgtttttttgaaaataagttatttttgtagttagaaaagaaaata

SEQ ID NO: 4971 - DNA, 120 bp, synthetic construct
  source 1..120: mol_type = other DNA
ataacaaacaatccatctataactataaaactatctacttcctcacctttttaaaaaaaataacatatatacaaacattatactttcctaaaaacaaaccatttctacaaccaaaaaaaa

SEQ ID NO: 4972 - DNA, 120 bp, synthetic construct
  source 1..120: mol_type = other DNA
atggtaaataatttatttatgattataaaattatttgtttttttatttttttgaaaaaggtaatatatatgtaagtattatgtttttttgaaaataagttatttttgtagttagaaaaga

SEQ ID NO: 4973 - DNA, 120 bp, synthetic construct; identical to SEQ ID NO: 4969
  source 1..120: mol_type = other DNA

SEQ ID NO: 4974 - DNA, 120 bp, synthetic construct; identical to SEQ ID NO: 4970
  source 1..120: mol_type = other DNA

SEQ ID NO: 4975 - DNA, 120 bp, synthetic construct; identical to SEQ ID NO: 4971
  source 1..120: mol_type = other DNA

SEQ ID NO: 4976 - DNA, 120 bp, synthetic construct; identical to SEQ ID NO: 4972
  source 1..120: mol_type = other DNA

SEQ ID NO: 4977 - DNA, 120 bp, synthetic construct
  source 1..120: mol_type = other DNA
attaaaaaaaaaaatataataatataaaaaatattcataatataatataaaaaaaaataataaatcaaaaatcaatatttataatatatcaatcataaaaaaatttacatatatatatat

SEQ ID NO: 4978 - DNA, 120 bp, synthetic construct
  source 1..120: mol_type = other DNA
gttaaagaagaaaatataatggtatgaaaaatgtttatgatatagtgtaaaggaaaataataggttagaaattagtatttatggtatgttaattgtgggaaaatttgtatatgtgtatat

SEQ ID NO: 4979 - DNA, 120 bp, synthetic construct
  source 1..120: mol_type = other DNA
aaaatattaaaaaaaaaaatataataatataaaaaatattcataatataatataaaaaaaaaaaaatcaatatttataatatatcaatcataaaaaaatttacatatatatatatataca

SEQ ID NO: 4980 - DNA, 120 bp, synthetic construct
  source 1..120: mol_type = other DNA
ggagtgttaaagaagaaaatataatggtatgaaaaatgtttatgatatagtgtaaaggaaaagaaattagtatttatggtatgttaattgtgggaaaatttgtatatgtgtatatatata

SEQ ID NO: 4981 - DNA, 120 bp, synthetic construct
  source 1..120: mol_type = other DNA
attaaaaaaaaaaatataataatataaaaaatattcataatataatataaaaaaaaataataaatcaaaaatcaatatttataatatatcaatcgtaaaaaaatttacatatatatatat

SEQ ID NO: 4982 - DNA, 120 bp, synthetic construct
  source 1..120: mol_type = other DNA
gttaaagaagaaaatataatggtatgaaaaatgtttatgatatagtgtaaaggaaaataataggttagaaattagtatttatggtatgttaatcgtgggaaaatttgtatatgtgtatat

SEQ ID NO: 4983 - DNA, 120 bp, synthetic construct
  source 1..120: mol_type = other DNA
aaaatattaaaaaaaaaaatataataatataaaaaatattcataatataatataaaaaaaaaaaaatcaatatttataatatatcaatcgtaaaaaaatttacatatatatatatataca

SEQ ID NO: 4984 - DNA, 120 bp, synthetic construct
  source 1..120: mol_type = other DNA
ggagtgttaaagaagaaaatataatggtatgaaaaatgtttatgatatagtgtaaaggaaaagaaattagtatttatggtatgttaatcgtgggaaaatttgtatatgtgtatatatata

SEQ ID NO: 4985 - DNA, 120 bp, synthetic construct
  source 1..120: mol_type = other DNA
caaaaacaatcaaaaattcatatttctctctaatcttaaaaaacataacaacaacccaactattaaacttacccacatcttactccaaaaattatttcctaactctaaaaattaaattcc

SEQ ID NO: 4986 - DNA, 120 bp, synthetic construct
  source 1..120: mol_type = other DNA
tagaaataattagaagtttatatttttttttgattttgagaaatatgataatagtttaattattgggtttatttatattttgttttaaaaattattttttagttttaaaaattaaatttt

SEQ ID NO: 4987 - DNA, 120 bp, synthetic construct
  source 1..120: mol_type = other DNA
aaaacaaaaacaatcaaaaattcatatttctctctaatcttaaaaaacataacaacaacccacttacccacatcttactccaaaaattatttcctaactctaaaaattaaattccctttt

SEQ ID NO: 4988 - DNA, 120 bp, synthetic construct
  source 1..120: mol_type = other DNA
gagatagaaataattagaagtttatatttttttttgattttgagaaatatgataatagtttgtttatttatattttgttttaaaaattattttttagttttaaaaattaaattttttttt

SEQ ID NO: 4989 - DNA, 120 bp, synthetic construct; identical to SEQ ID NO: 4985
  source 1..120: mol_type = other DNA

SEQ ID NO: 4990 - DNA, 120 bp, synthetic construct; identical to SEQ ID NO: 4986
  source 1..120: mol_type = other DNA

SEQ ID NO: 4991 - DNA, 120 bp, synthetic construct
  source 1..120: mol_type = other DNA
aaaacaaaaacaatcaaaaattcatatttctctctaatcttaaaaaacataacaacaacccgcttacccacatcttactccaaaaattatttcctaactctaaaaattaaattccctttt

SEQ ID NO: 4992 - DNA, 120 bp, synthetic construct
  source 1..120: mol_type = other DNA
gagatagaaataattagaagtttatatttttttttgattttgagaaatatgataatagttcgtttatttatattttgttttaaaaattattttttagttttaaaaattaaattttttttt

SEQ ID NO: 4993 - DNA, 120 bp, synthetic construct
  source 1..120: mol_type = other DNA
acttcttctctctacacttcctcactatcctcaccccactacaccctaataacaaatcctctcaaaactaacacaactcattcctaatattaataactcaaaaaaaaaaccttaaaatca

SEQ ID NO: 4994 - DNA, 120 bp, synthetic construct
  source 1..120: mol_type = other DNA
gttttttttttttgtatttttttattgtttttattttgttgtattttggtgataggtttttttagagttagtatagtttatttttagtattaatggtttagggagggggttttggagtta

SEQ ID NO: 4995 - DNA, 120 bp, synthetic construct
  source 1..120: mol_type = other DNA
aaaaacttcttctctctacacttcctcactatcctcaccccactacaccctaataacaaatactaacacaactcattcctaatattaataactcaaaaaaaaaaccttaaaatcaaccca

SEQ ID NO: 4996 - DNA, 120 bp, synthetic construct
  source 1..120: mol_type = other DNA
gagggttttttttttttgtatttttttattgtttttattttgttgtattttggtgataggtgttagtatagtttatttttagtattaatggtttagggagggggttttggagttagttta

SEQ ID NO: 4997 - DNA, 120 bp, synthetic construct
  source 1..120: mol_type = other DNA
acttcttctctctacacttcctcactatcctcaccccgctacaccctaataacaaatcctctcaaaactaacacaactcattcctaatattaataactcaaaaaaaaaaccttaaaatca

SEQ ID NO: 4998 - DNA, 120 bp, synthetic construct
  source 1..120: mol_type = other DNA
gttttttttttttgtatttttttattgtttttatttcgttgtattttggtgataggtttttttagagttagtatagtttatttttagtattaatggtttagggagggggttttggagtta

SEQ ID NO: 4999 - DNA, 120 bp, synthetic construct
  source 1..120: mol_type = other DNA
aaaaacttcttctctctacacttcctcactatcctcaccccgctacaccctaataacaaatactaacacaactcattcctaatattaataactcaaaaaaaaaaccttaaaatcaaccca

SEQ ID NO: 5000 - DNA, 120 bp, synthetic construct
  source 1..120: mol_type = other DNA
gagggttttttttttttgtatttttttattgtttttatttcgttgtattttggtgataggtgttagtatagtttatttttagtattaatggtttagggagggggttttggagttagttta

SEQ ID NO: 5001 - DNA, 120 bp, synthetic construct
  source 1..120: mol_type = other DNA
tactaaaactttattctctttttaaatctccatcctattatacaatttaataatcaattcccttatttcctatcctaaaatcaaataatatttaataactacaaacattttaatttatta

SEQ ID NO: 5002 - DNA, 120 bp, synthetic construct
  source 1..120: mol_type = other DNA
tattaggattttgttttttttttagatttttattttgttgtgtagtttaataattaatttttttgttttttattttgaagttaaataatgtttaataattataggtattttagtttgttg

SEQ ID NO: 5003 - DNA, 120 bp, synthetic construct
  source 1..120: mol_type = other DNA
ttcctactaaaactttattctctttttaaatctccatcctattatacaatttaataatcaattcctatcctaaaatcaaataatatttaataactacaaacattttaatttattatttat

SEQ ID NO: 5004 - DNA, 120 bp, synthetic construct
  source 1..120: mol_type = other DNA
tttttattaggattttgttttttttttagatttttattttgttgtgtagtttaataattaatttttattttgaagttaaataatgtttaataattataggtattttagtttgttgtttgt

SEQ ID NO: 5005 - DNA, 120 bp, synthetic construct; identical to SEQ ID NO: 5001
  source 1..120: mol_type = other DNA

SEQ ID NO: 5006 - DNA, 120 bp, synthetic construct; identical to SEQ ID NO: 5002
  source 1..120: mol_type = other DNA

SEQ ID NO: 5007 - DNA, 120 bp, synthetic construct; identical to SEQ ID NO: 5003
  source 1..120: mol_type = other DNA

SEQ ID NO: 5008 - DNA, 120 bp, synthetic construct; identical to SEQ ID NO: 5004
  source 1..120: mol_type = other DNA

SEQ ID NO: 5009 - DNA, 120 bp, synthetic construct
  source 1..120: mol_type = other DNA
acttaaacaaatacttcacaaaacaaaaaatccaaattatcaataaaaaaatataaacctcattaattatcacacaaattacaaccacactaatacacactatcctaacactataataac

SEQ ID NO: 5010 - DNA, 120 bp, synthetic construct
  source 1..120: mol_type = other DNA
atttgaatagatattttataaaataagaaatttaaattgttaatgaaaaggtgtaaattttattagttattatgtaaattgtaattatattgatatatattattttggtattgtaatagt

SEQ ID NO: 5011 - DNA, 120 bp, synthetic construct
  source 1..120: mol_type = other DNA
ataaaacttaaacaaatacttcacaaaacaaaaaatccaaattatcaataaaaaaatataattatcacacaaattacaaccacactaatacacactatcctaacactataataaccacaa

SEQ ID NO: 5012 - DNA, 120 bp, synthetic construct
  source 1..120: mol_type = other DNA
gtaaaatttgaatagatattttataaaataagaaatttaaattgttaatgaaaaggtgtaattattatgtaaattgtaattatattgatatatattattttggtattgtaatagttataa

SEQ ID NO: 5013 - DNA, 120 bp, synthetic construct
  source 1..120: mol_type = other DNA
acttaaacaaatacttcacaaaacaaaaaatccaaattatcaataaaaaaatataaacctcattaattatcacgcaaattacaaccacactaatacacactatcctaacactataataac

SEQ ID NO: 5014 - DNA, 120 bp, synthetic construct
  source 1..120: mol_type = other DNA
atttgaatagatattttataaaataagaaatttaaattgttaatgaaaaggtgtaaattttattagttattacgtaaattgtaattatattgatatatattattttggtattgtaatagt

SEQ ID NO: 5015 - DNA, 120 bp, synthetic construct
  source 1..120: mol_type = other DNA
ataaaacttaaacaaatacttcacaaaacaaaaaatccaaattatcaataaaaaaatataattatcacgcaaattacaaccacactaatacacactatcctaacactataataaccacaa

SEQ ID NO: 5016 - DNA, 120 bp, synthetic construct
  source 1..120: mol_type = other DNA
gtaaaatttgaatagatattttataaaataagaaatttaaattgttaatgaaaaggtgtaattattacgtaaattgtaattatattgatatatattattttggtattgtaatagttataa

SEQ ID NO: 5017 - DNA, 120 bp, synthetic construct
  source 1..120: mol_type = other DNA
aataactacctctaacctctaactaatacaatcattaaacaaaaataaaaaaaataaattactatatatactttataatttacacaactctttaacaatataatctcctttaaaataaat

SEQ ID NO: 5018 - DNA, 120 bp, synthetic construct
  source 1..120: mol_type = other DNA
aatgattgtttttggtttttagttgatataattattaaataggaataagaaaagtaagttattgtgtatattttatagtttatataattttttaataatatggttttttttgagatgggt

SEQ ID NO: 5019 - DNA, 120 bp, synthetic construct
  source 1..120: mol_type = other DNA
tctaaataactacctctaacctctaactaatacaatcattaaacaaaaataaaaaaaataatatactttataatttacacaactctttaacaatataatctcctttaaaataaataaaac

SEQ ID NO: 5020 - DNA, 120 bp, synthetic construct
  source 1..120: mol_type = other DNA
tttaaatgattgtttttggtttttagttgatataattattaaataggaataagaaaagtaatatattttatagtttatataattttttaataatatggttttttttgagatgggtgagat

SEQ ID NO: 5021 - DNA, 120 bp, synthetic construct; identical to SEQ ID NO: 5017
  source 1..120: mol_type = other DNA

SEQ ID NO: 5022 - DNA, 120 bp, synthetic construct; identical to SEQ ID NO: 5018
  source 1..120: mol_type = other DNA

SEQ ID NO: 5023 - DNA, 120 bp, synthetic construct; identical to SEQ ID NO: 5019
  source 1..120: mol_type = other DNA

SEQ ID NO: 5024 - DNA, 120 bp, synthetic construct; identical to SEQ ID NO: 5020
  source 1..120: mol_type = other DNA

SEQ ID NO: 5025 - DNA, 120 bp, synthetic construct
  source 1..120: mol_type = other DNA
taaaccaacatttttatcacaaactaatctaccaaccacaaataaactttcttcttcaaaaactactttttaaaacctttcacctatttaaatcaaacccacccaaattatctaaaatca

SEQ ID NO: 5026 - DNA, 120 bp, synthetic construct
  source 1..120: mol_type = other DNA
taggttggtatttttgttataggttgatttgttgattataagtagatttttttttttaagggttgttttttagggttttttatttgtttgaattgggtttatttagattatttaggatta

SEQ ID NO: 5027 - DNA, 120 bp, synthetic construct
  source 1..120: mol_type = other DNA
caacatttttatcacaaactaatctaccaaccacaaataaactttcttcttcaaaaaaacctcaacactactttttaaaacctttcacctatttaaatcaaacccacccaaattatctaa

SEQ ID NO: 5028 - DNA, 120 bp, synthetic construct
  source 1..120: mol_type = other DNA
tggtatttttgttataggttgatttgttgattataagtagatttttttttttaaggaagttttagtgttgttttttagggttttttatttgtttgaattgggtttatttagattatttag

SEQ ID NO: 5029 - DNA, 120 bp, synthetic construct
  source 1..120: mol_type = other DNA
taaaccgacatttttatcacaaactaatctaccgaccacaaataaactttcttcttcaaaaactactttttaaaacctttcacctatttaaatcgaacccacccaaattatctaaaatca

SEQ ID NO: 5030 - DNA, 120 bp, synthetic construct
  source 1..120: mol_type = other DNA
taggtcggtatttttgttataggttgatttgtcgattataagtagatttttttttttaagggttgttttttagggttttttatttgtttgaatcgggtttatttagattatttaggatta

SEQ ID NO: 5031 - DNA, 120 bp, synthetic construct
  source 1..120: mol_type = other DNA
cgacatttttatcacaaactaatctaccgaccacaaataaactttcttcttcaaaaaaacctcaacgctactttttaaaacctttcacctatttaaatcgaacccacccaaattatctaa

SEQ ID NO: 5032 - DNA, 120 bp, synthetic construct
  source 1..120: mol_type = other DNA
cggtatttttgttataggttgatttgtcgattataagtagatttttttttttaaggaagttttagcgttgttttttagggttttttatttgtttgaatcgggtttatttagattatttag

SEQ ID NO: 5033 - DNA, 120 bp, synthetic construct
  source 1..120: mol_type = other DNA
atctaaaaaatataaatacccaatccattatattatttaaattattcaattctttttcaactatactccctacaattaaaaacaaaaattaacaaacttttattataaaaaaccaaatta

SEQ ID NO: 5034 - DNA, 120 bp, synthetic construct
  source 1..120: mol_type = other DNA
atttgggaagtgtagatatttaatttattatgttatttgagttatttaatttttttttaattgtgttttttatagttgaaagtagggattggtaaatttttgttataaagggttagattg

SEQ ID NO: 5035 - DNA, 120 bp, synthetic construct
  source 1..120: mol_type = other DNA
aaaaatataaatacccaatccattatattatttaaattattcaattctttttcaacaaacatttatatactccctacaattaaaaacaaaaattaacaaacttttattataaaaaaccaa

SEQ ID NO: 5036 - DNA, 120 bp, synthetic construct
  source 1..120: mol_type = other DNA
ggaagtgtagatatttaatttattatgttatttgagttatttaatttttttttaatagatgtttatgtgttttttatagttgaaagtagggattggtaaatttttgttataaagggttag

SEQ ID NO: 5037 - DNA, 120 bp, synthetic construct; identical to SEQ ID NO: 5033
  source 1..120: mol_type = other DNA

SEQ ID NO: 5038 - DNA, 120 bp, synthetic construct; identical to SEQ ID NO: 5034
  source 1..120: mol_type = other DNA

SEQ ID NO: 5039 - DNA, 120 bp, synthetic construct
  source 1..120: mol_type = other DNA
aaaaatataaatacccaatccattatattatttaaattattcaattctttttcaacaaacgtttatatactccctacaattaaaaacaaaaattaacaaacttttattataaaaaaccaa

SEQ ID NO: 5040 - DNA, 120 bp, synthetic construct
  source 1..120: mol_type = other DNA
ggaagtgtagatatttaatttattatgttatttgagttatttaatttttttttaatagacgtttatgtgttttttatagttgaaagtagggattggtaaatttttgttataaagggttag

SEQ ID NO: 5041 - DNA, 120 bp, synthetic construct
  source 1..120: mol_type = other DNA
aatcacacaaaccaaatccctctccaataatcataattcacacacctcttctaaaaactctatttctttccctcaatcaaaacaaaacctcttcctctcttctcttcctactaacctaac

SEQ ID NO: 5042 - DNA, 120 bp, synthetic construct
  source 1..120: mol_type = other DNA
ggttatataggttaagtttttttttaatgattatggtttatatattttttttgagaattttattttttttttttagttaagatagagttttttttttttttttttttttgttgatttagt

SEQ ID NO: 5043 - DNA, 120 bp, synthetic construct
  source 1..120: mol_type = other DNA
aataaatcacacaaaccaaatccctctccaataatcataattcacacacctcttctaaaaactttccctcaatcaaaacaaaacctcttcctctcttctcttcctactaacctaacaacc

SEQ ID NO: 5044 - DNA, 120 bp, synthetic construct
  source 1..120: mol_type = other DNA
ggtaggttatataggttaagtttttttttaatgattatggtttatatattttttttgagaatttttttttagttaagatagagttttttttttttttttttttttgttgatttagtagtt

SEQ ID NO: 5045 - DNA, 120 bp, synthetic construct; identical to SEQ ID NO: 5041
  source 1..120: mol_type = other DNA

SEQ ID NO: 5046 - DNA, 120 bp, synthetic construct; identical to SEQ ID NO: 5042
  source 1..120: mol_type = other DNA

SEQ ID NO: 5047 - DNA, 120 bp, synthetic construct; identical to SEQ ID NO: 5043
  source 1..120: mol_type = other DNA

SEQ ID NO: 5048 - DNA, 120 bp, synthetic construct; identical to SEQ ID NO: 5044
  source 1..120: mol_type = other DNA

SEQ ID NO: 5049 - DNA, 120 bp, synthetic construct
  source 1..120: mol_type = other DNA
ataaacaaaaaaaacataaaaaaacttctacacatccttaactcatacaatttaaatctaccacatcctcaatacaacaaacactcactacattcaaaacacaaaacactctaaaatata

SEQ ID NO: 5050 - DNA, 120 bp, synthetic construct
  source 1..120: mol_type = other DNA
gtgagtaagaaaggtatggaaagatttttgtatatttttagtttatgtagtttaaatttgttatatttttaatatagtaaatatttattgtatttaaaatatggaatattttgaagtgtg

SEQ ID NO: 5051 - DNA, 120 bp, synthetic construct
  source 1..120: mol_type = other DNA
caaaaaaaacataaaaaaacttctacacatccttaactcatacaatttaaatctaccactattaacacatcctcaatacaacaaacactcactacattcaaaacacaaaacactctaaaa

SEQ ID NO: 5052 - DNA, 120 bp, synthetic construct
  source 1..120: mol_type = other DNA
taagaaaggtatggaaagatttttgtatatttttagtttatgtagtttaaatttgttattgttaatatatttttaatatagtaaatatttattgtatttaaaatatggaatattttgaag

SEQ ID NO: 5053 - DNA, 120 bp, synthetic construct
  source 1..120: mol_type = other DNA
ataaacaaaaaaaacataaaaaaacttctacacatccttaactcatacaatttaaatctaccacatcctcaatacaacaaacactcactacattcaaaacacgaaacactctaaaatata

SEQ ID NO: 5054 - DNA, 120 bp, synthetic construct
  source 1..120: mol_type = other DNA
gtgagtaagaaaggtatggaaagatttttgtatatttttagtttatgtagtttaaatttgttatatttttaatatagtaaatatttattgtatttaaaatacggaatattttgaagtgtg

SEQ ID NO: 5055 - DNA, 120 bp, synthetic construct
  source 1..120: mol_type = other DNA
caaaaaaaacataaaaaaacttctacacatccttaactcatacaatttaaatctaccactattaacacatcctcaatacaacaaacactcactacattcaaaacacgaaacactctaaaa

SEQ ID NO: 5056 - DNA, 120 bp, synthetic construct
  source 1..120: mol_type = other DNA
taagaaaggtatggaaagatttttgtatatttttagtttatgtagtttaaatttgttattgttaatatatttttaatatagtaaatatttattgtatttaaaatacggaatattttgaag

SEQ ID NO: 5057 - DNA, 120 bp, synthetic construct
  source 1..120: mol_type = other DNA
aaacaaatttacaaacaataactataaaatataataaaaaaaattaaatctaaataaccctaatctacccaaaaaacatccaaaaaaacttcccaaaaaaaataccaatcaaaataaata

SEQ ID NO: 5058 - DNA, 120 bp, synthetic construct
  source 1..120: mol_type = other DNA
agatagatttgtaaataatgattataaagtatggtaggggaagttgggtttaagtgattttaatttatttagagagtatttaggaaggttttttgaaagaagtgttaattaaggtgagtg

SEQ ID NO: 5059 - DNA, 120 bp, synthetic construct
  source 1..120: mol_type = other DNA
aaaaaaaacaaatttacaaacaataactataaaatataataaaaaaaattaaatctaaataacccaaaaaacatccaaaaaaacttcccaaaaaaaataccaatcaaaataaatactaaa

SEQ ID NO: 5060 - DNA, 120 bp, synthetic construct
  source 1..120: mol_type = other DNA
gggaaagatagatttgtaaataatgattataaagtatggtaggggaagttgggtttaagtgatttagagagtatttaggaaggttttttgaaagaagtgttaattaaggtgagtgttaaa

SEQ ID NO: 5061 - DNA, 120 bp, synthetic construct
  source 1..120: mol_type = other DNA
aaacaaatttacaaacaataactataaaatataataaaaaaaattaaatctaaataaccctaatctacccaaaaaacatccaaaaaaacttcccgaaaaaaataccaatcaaaataaata

SEQ ID NO: 5062 - DNA, 120 bp, synthetic construct
  source 1..120: mol_type = other DNA
agatagatttgtaaataatgattataaagtatggtaggggaagttgggtttaagtgattttaatttatttagagagtatttaggaaggtttttcgaaagaagtgttaattaaggtgagtg

SEQ ID NO: 5063 - DNA, 120 bp, synthetic construct
  source 1..120: mol_type = other DNA
aaaaaaaacaaatttacaaacaataactataaaatataataaaaaaaattaaatctaaataacccaaaaaacatccaaaaaaacttcccgaaaaaaataccaatcaaaataaatactaaa

SEQ ID NO: 5064 - DNA, 120 bp, synthetic construct
  source 1..120: mol_type = other DNA
gggaaagatagatttgtaaataatgattataaagtatggtaggggaagttgggtttaagtgatttagagagtatttaggaaggtttttcgaaagaagtgttaattaaggtgagtgttaaa

SEQ ID NO: 5065 - DNA, 120 bp, synthetic construct
  source 1..120: mol_type = other DNA
ctaaaatatataccaaaacaaaataatatacttaaaacaacccccattttaattactttataaattatctaaatctacactaaaatatatatttcataataacaataattttataaattt

SEQ ID NO: 5066 - DNA, 120 bp, synthetic construct
  source 1..120: mol_type = other DNA
ttgaaatatgtgttaaagtaagataatatatttaaaataatttttattttaattattttgtaaattgtttaaatttgtattagaatgtatgttttataatagtagtaattttgtggattt

SEQ ID NO: 5067 - DNA, 120 bp, synthetic construct
  source 1..120: mol_type = other DNA
tatttctaaaatatataccaaaacaaaataatatacttaaaacaacccccattttaattacatctaaatctacactaaaatatatatttcataataacaataattttataaattttatat

SEQ ID NO: 5068 - DNA, 120 bp, synthetic construct
  source 1..120: mol_type = other DNA
tgtttttgaaatatgtgttaaagtaagataatatatttaaaataatttttattttaattatgtttaaatttgtattagaatgtatgttttataatagtagtaattttgtggattttgtat

SEQ ID NO: 5069 - DNA, 120 bp, synthetic construct; identical to SEQ ID NO: 5065
  source 1..120: mol_type = other DNA

SEQ ID NO: 5070 - DNA, 120 bp, synthetic construct; identical to SEQ ID NO: 5066
  source 1..120: mol_type = other DNA

SEQ ID NO: 5071 - DNA, 120 bp, synthetic construct
  source 1..120: mol_type = other DNA
tatttctaaaatatataccaaaacaaaataatatacttaaaacaacccccattttaattacgtctaaatctacactaaaatatatatttcataataacaataattttataaattttatat

SEQ ID NO: 5072 - DNA, 120 bp, synthetic construct
  source 1..120: mol_type = other DNA
tgtttttgaaatatgtgttaaagtaagataatatatttaaaataatttttattttaattacgtttaaatttgtattagaatgtatgttttataatagtagtaattttgtggattttgtat

SEQ ID NO: 5073 - DNA, 120 bp, synthetic construct
  source 1..120: mol_type = other DNA
ttaaaaatcacaaaaaaatcttaactttcttaaaacttactcaaattaaataactaaaactactaactaaattcatcaactccttttaaaattctttttcttaataattataaatctcaa

SEQ ID NO: 5074 - DNA, 120 bp, synthetic construct
  source 1..120: mol_type = other DNA
ttaaggattatagaaggattttaatttttttagggtttatttaaattaagtagttggagttattggttggatttattaattttttttgagatttttttttttagtgattataggttttag

SEQ ID NO: 5075 - DNA, 120 bp, synthetic construct
  source 1..120: mol_type = other DNA
aaattaaaaatcacaaaaaaatcttaactttcttaaaacttactcaaattaaataactaaaactaaattcatcaactccttttaaaattctttttcttaataattataaatctcaaaaaa

SEQ ID NO: 5076 - DNA, 120 bp, synthetic construct
  source 1..120: mol_type = other DNA
aagttaaggattatagaaggattttaatttttttagggtttatttaaattaagtagttggagttggatttattaattttttttgagatttttttttttagtgattataggttttaggaaa

SEQ ID NO: 5077 - DNA, 120 bp, synthetic construct; identical to SEQ ID NO: 5073
  source 1..120: mol_type = other DNA

SEQ ID NO: 5078 - DNA, 120 bp, synthetic construct; identical to SEQ ID NO: 5074
  source 1..120: mol_type = other DNA

SEQ ID NO: 5079 - DNA, 120 bp, synthetic construct; identical to SEQ ID NO: 5075
  source 1..120: mol_type = other DNA

SEQ ID NO: 5080 - DNA, 120 bp, synthetic construct; identical to SEQ ID NO: 5076
  source 1..120: mol_type = other DNA

SEQ ID NO: 5081 - DNA, 120 bp, synthetic construct
  source 1..120: mol_type = other DNA
ttacaaaaaaaatttctaaaaaacccccatctaactaaacccaaaaacacaatcttcaccaaccctaaaatcctaaaacacctaaccacctctacactatctactctaacccaaaatcaa

SEQ ID NO: 5082 - DNA, 120 bp, synthetic construct
  source 1..120: mol_type = other DNA
ttatagaaagaatttttggggagtttttatttagttggatttagaaatataatttttattagttttggagttttggagtatttggttatttttgtgttgtttgttttggtttagaattaa

SEQ ID NO: 5083 - DNA, 120 bp, synthetic construct
  source 1..120: mol_type = other DNA
aaaaaaatttctaaaaaacccccatctaactaaacccaaaaacacaatcttcaccaactcattcctaccctaaaatcctaaaacacctaaccacctctacactatctactctaacccaaa

SEQ ID NO: 5084 - DNA, 120 bp, synthetic construct
  source 1..120: mol_type = other DNA
gaaagaatttttggggagtttttatttagttggatttagaaatataatttttattagtttatttttgttttggagttttggagtatttggttatttttgtgttgtttgttttggtttaga

SEQ ID NO: 5085 - DNA, 120 bp, synthetic construct
  source 1..120: mol_type = other DNA
ttacaaaaaaaatttctaaaaaacccccatctaactaaacccaaaaacacaatcttcaccaaccctaaaatcctaaaacacctaaccacctctacgctatctactctaacccaaaatcaa

SEQ ID NO: 5086 - DNA, 120 bp, synthetic construct
  source 1..120: mol_type = other DNA
ttatagaaagaatttttggggagtttttatttagttggatttagaaatataatttttattagttttggagttttggagtatttggttatttttgcgttgtttgttttggtttagaattaa

SEQ ID NO: 5087 - DNA, 120 bp, synthetic construct
  source 1..120: mol_type = other DNA
aaaaaaatttctaaaaaacccccatctaactaaacccaaaaacacaatcttcaccaactcattcctaccctaaaatcctaaaacacctaaccacctctacgctatctactctaacccaaa

SEQ ID NO: 5088 - DNA, 120 bp, synthetic construct
  source 1..120: mol_type = other DNA
gaaagaatttttggggagtttttatttagttggatttagaaatataatttttattagtttatttttgttttggagttttggagtatttggttatttttgcgttgtttgttttggtttaga

SEQ ID NO: 5089 - DNA, 120 bp, synthetic construct
  source 1..120: mol_type = other DNA
taaccaataattctaatataaaatcattcttttaacttcaaaattttattccttatttaaatataaacacccaataatactcttaaactaaatactaactcattcacattttcaaaaaat

SEQ ID NO: 5090 - DNA, 120 bp, synthetic construct
  source 1..120: mol_type = other DNA
tggttaataattttggtgtagaattatttttttgattttaaggttttgttttttatttaaatataaatatttagtggtatttttgagttaagtattggtttatttatatttttaggaagt

SEQ ID NO: 5091 - DNA, 120 bp, synthetic construct
  source 1..120: mol_type = other DNA
ctcactaaccaataattctaatataaaatcattcttttaacttcaaaattttattccttatacacccaataatactcttaaactaaatactaactcattcacattttcaaaaaatttaca

SEQ ID NO: 5092 - DNA, 120 bp, synthetic construct
  source 1..120: mol_type = other DNA
tttattggttaataattttggtgtagaattatttttttgattttaaggttttgttttttatatatttagtggtatttttgagttaagtattggtttatttatatttttaggaagtttgta

SEQ ID NO: 5093 - DNA, 120 bp, synthetic construct; identical to SEQ ID NO: 5089
  source 1..120: mol_type = other DNA

SEQ ID NO: 5094 - DNA, 120 bp, synthetic construct; identical to SEQ ID NO: 5090
  source 1..120: mol_type = other DNA

SEQ ID NO: 5095 - DNA, 120 bp, synthetic construct; identical to SEQ ID NO: 5091
  source 1..120: mol_type = other DNA

SEQ ID NO: 5096 - DNA, 120 bp, synthetic construct; identical to SEQ ID NO: 5092
  source 1..120: mol_type = other DNA

SEQ ID NO: 5097 - DNA, 120 bp, synthetic construct
  source 1..120: mol_type = other DNA
acaacaaaaaaaaataaaaaaaaaacccccactatacaaaatatactaaataattcttacctaaactcatctatattaaaaaatatattctcattcacaaattaaaaaaaaaaaaaaact

SEQ ID NO: 5098 - DNA, 120 bp, synthetic construct
  source 1..120: mol_type = other DNA
gtagtagaaagaggtgagaaggaggtttttattgtgtaaagtgtgttgaatgatttttgtttgggtttatttgtattgaagaatgtgtttttatttataagttgaggaaagaggaaagtt

SEQ ID NO: 5099 - DNA, 120 bp, synthetic construct
  source 1..120: mol_type = other DNA
acaacaacaaaaaaaaataaaaaaaaaacccccactatacaaaatatactaaataattcttactcatctatattaaaaaatatattctcattcacaaattaaaaaaaaaaaaaaactact

SEQ ID NO: 5100 - DNA, 120 bp, synthetic construct
  source 1..120: mol_type = other DNA
gtagtagtagaaagaggtgagaaggaggtttttattgtgtaaagtgtgttgaatgatttttgtttatttgtattgaagaatgtgtttttatttataagttgaggaaagaggaaagttgtt

SEQ ID NO: 5101 - DNA, 120 bp, synthetic construct; identical to SEQ ID NO: 5097
  source 1..120: mol_type = other DNA

SEQ ID NO: 5102 - DNA, 120 bp, synthetic construct; identical to SEQ ID NO: 5098
  source 1..120: mol_type = other DNA

SEQ ID NO: 5103 - DNA, 120 bp, synthetic construct; identical to SEQ ID NO: 5099
  source 1..120: mol_type = other DNA

SEQ ID NO: 5104 - DNA, 120 bp, synthetic construct; identical to SEQ ID NO: 5100
  source 1..120: mol_type = other DNA

SEQ ID NO: 5105 - DNA, 120 bp, synthetic construct
  source 1..120: mol_type = other DNA
attcaaaaaaaaattaacccaatatttcaattaaataatactaaaaaaatttccacatacatataacatttccttcaataaacatatattataaaaacaaaattaaaaaataaaatattc

SEQ ID NO: 5106 - DNA, 120 bp, synthetic construct
  source 1..120: mol_type = other DNA
gtttaaagaaaggttggtttaatgttttaattaggtaatgttgagaaaatttttatatgtatgtgatattttttttaataggtatgtgttgtaggaataagattgggggatggagtattt

SEQ ID NO: 5107 - DNA, 120 bp, synthetic construct
  source 1..120: mol_type = other DNA
aaaaaaaattaacccaatatttcaattaaataatactaaaaaaatttccacatacatttaactaactataacatttccttcaataaacatatattataaaaacaaaattaaaaaataaaa

SEQ ID NO: 5108 - DNA, 120 bp, synthetic construct
  source 1..120: mol_type = other DNA
aagaaaggttggtttaatgttttaattaggtaatgttgagaaaatttttatatgtatttgattaattgtgatattttttttaataggtatgtgttgtaggaataagattgggggatggag

SEQ ID NO: 5109 - DNA, 120 bp, synthetic construct; identical to SEQ ID NO: 5105
  source 1..120: mol_type = other DNA

SEQ ID NO: 5110 - DNA, 120 bp, synthetic construct; identical to SEQ ID NO: 5106
  source 1..120: mol_type = other DNA

SEQ ID NO: 5111 - DNA, 120 bp, synthetic construct; identical to SEQ ID NO: 5107
  source 1..120: mol_type = other DNA

SEQ ID NO: 5112 - DNA, 120 bp, synthetic construct; identical to SEQ ID NO: 5108
  source 1..120: mol_type = other DNA

SEQ ID NO: 5113 - DNA, 120 bp, synthetic construct
  source 1..120: mol_type = other DNA
aaaaaaaaatataaaaatatattatataccatcattaaaaataatctaataaacaaaaaaaaaattaataataataaaaaaataaattattaaacaaataaaatccttaaaaaaattaaa

SEQ ID NO: 5114 - DNA, 120 bp, synthetic construct
  source 1..120: mol_type = other DNA
gaaagaagatatgagaatgtattatatgttattattgggaatgatttagtaaataagagaaaggttgataataatggagaaatagattattagatgaataaaatttttgagaaggttgga

SEQ ID NO: 5115 - DNA, 120 bp, synthetic construct
  source 1..120: mol_type = other DNA
taaaaaaaaaaaaatataaaaatatattatataccatcattaaaaataatctaataaacaaaataataataaaaaaataaattattaaacaaataaaatccttaaaaaaattaaaaaaaa

SEQ ID NO: 5116 - DNA, 120 bp, synthetic construct
  source 1..120: mol_type = other DNA
taaaagaaagaagatatgagaatgtattatatgttattattgggaatgatttagtaaataagataataatggagaaatagattattagatgaataaaatttttgagaaggttggaggaag

SEQ ID NO: 5117 - DNA, 120 bp, synthetic construct
  source 1..120: mol_type = other DNA
aaaaaaaaatataaaaatatattatataccatcattaaaaataatctaataaacaaaaaaaaaattaataataataaaaaaataaattattaaacgaataaaatccttaaaaaaattaaa

SEQ ID NO: 5118 - DNA, 120 bp, synthetic construct
  source 1..120: mol_type = other DNA
gaaagaagatatgagaatgtattatatgttattattgggaatgatttagtaaataagagaaaggttgataataatggagaaatagattattagacgaataaaatttttgagaaggttgga

SEQ ID NO: 5119 - DNA, 120 bp, synthetic construct
  source 1..120: mol_type = other DNA
taaaaaaaaaaaaatataaaaatatattatataccatcattaaaaataatctaataaacaaaataataataaaaaaataaattattaaacgaataaaatccttaaaaaaattaaaaaaaa

SEQ ID NO: 5120 - DNA, 120 bp, synthetic construct
  source 1..120: mol_type = other DNA
taaaagaaagaagatatgagaatgtattatatgttattattgggaatgatttagtaaataagataataatggagaaatagattattagacgaataaaatttttgagaaggttggaggaag

SEQ ID NO: 5121 - DNA, 120 bp, synthetic construct
  source 1..120: mol_type = other DNA
ctaaattcataacaaaaccataacttaaacccaaattaccttactctaattctaaattaaatccctactccaccctcactaaaaaaaaaaacattttaaaataaaattaattcctttcta

SEQ ID NO: 5122 - DNA, 120 bp, synthetic construct
  source 1..120: mol_type = other DNA
ttgagtttatggtagaattatgatttaaatttagattgttttattttaattttagattaaatttttattttatttttattaggagaaagaatattttgagatggaattgattttttttta

SEQ ID NO: 5123 - DNA, 120 bp, synthetic construct
  source 1..120: mol_type = other DNA
aaaactaaattcataacaaaaccataacttaaacccaaattaccttactctaattctaaattactccaccctcactaaaaaaaaaaacattttaaaataaaattaattcctttctacata

SEQ ID NO: 5124 - DNA, 120 bp, synthetic construct
  source 1..120: mol_type = other DNA
aaaattgagtttatggtagaattatgatttaaatttagattgttttattttaattttagattattttatttttattaggagaaagaatattttgagatggaattgatttttttttatata

SEQ ID NO: 5125 - DNA, 120 bp, synthetic construct; identical to SEQ ID NO: 5121
  source 1..120: mol_type = other DNA

SEQ ID NO: 5126 - DNA, 120 bp, synthetic construct; identical to SEQ ID NO: 5122
  source 1..120: mol_type = other DNA

SEQ ID NO: 5127 - DNA, 120 bp, synthetic construct; identical to SEQ ID NO: 5123
  source 1..120: mol_type = other DNA

SEQ ID NO: 5128 - DNA, 120 bp, synthetic construct; identical to SEQ ID NO: 5124
  source 1..120: mol_type = other DNA

SEQ ID NO: 5129 - DNA, 120 bp, synthetic construct
  source 1..120: mol_type = other DNA
ccaaacctcataaatatacttcaataacacctcttttataatattactaaactcaaccatatccctcataaacaaaaaatccaaaaaacccaactttacttaacaaacacacttttacaa

SEQ ID NO: 5130 - DNA, 120 bp, synthetic construct
  source 1..120: mol_type = other DNA
ttagattttataaatgtgttttaatggtgttttttttgtaatattgttaagtttagttatgttttttataagtaggaaatttaggaagtttagttttgtttgatgaatatatttttgtag

SEQ ID NO: 5131 - DNA, 120 bp, synthetic construct
  source 1..120: mol_type = other DNA
acctcataaatatacttcaataacacctcttttataatattactaaactcaaccatatcttattctccctcataaacaaaaaatccaaaaaacccaactttacttaacaaacacactttt

SEQ ID NO: 5132 - DNA, 120 bp, synthetic construct
  source 1..120: mol_type = other DNA
attttataaatgtgttttaatggtgttttttttgtaatattgttaagtttagttatgttttatttttttttataagtaggaaatttaggaagtttagttttgtttgatgaatatattttt

SEQ ID NO: 5133 - DNA, 120 bp, synthetic construct
  source 1..120: mol_type = other DNA
ccaaacctcataaatatacttcaataacgcctcttttataatattactaaactcaaccatatccctcataaacaaaaaatccaaaaaacccaactttacttaacgaacacacttttacaa

SEQ ID NO: 5134 - DNA, 120 bp, synthetic construct
  source 1..120: mol_type = other DNA
ttagattttataaatgtgttttaatggcgttttttttgtaatattgttaagtttagttatgttttttataagtaggaaatttaggaagtttagttttgtttgacgaatatatttttgtag

SEQ ID NO: 5135 - DNA, 120 bp, synthetic construct
  source 1..120: mol_type = other DNA
acctcataaatatacttcaataacgcctcttttataatattactaaactcaaccatatcttattctccctcataaacaaaaaatccaaaaaacccaactttacttaacgaacacactttt

SEQ ID NO: 5136 - DNA, 120 bp, synthetic construct
  source 1..120: mol_type = other DNA
attttataaatgtgttttaatggcgttttttttgtaatattgttaagtttagttatgttttatttttttttataagtaggaaatttaggaagtttagttttgtttgacgaatatattttt

SEQ ID NO: 5137 - DNA, 120 bp, synthetic construct
  source 1..120: mol_type = other DNA
ctacactaaacacattatactctaaatcttctcaccaaaaaaaaaacaaaatttttcaactctaaaattcctaaatatcccaacttcctataaccttaatatccccaaactaaatctaaa

SEQ ID NO: 5138 - DNA, 120 bp, synthetic construct
  source 1..120: mol_type = other DNA
ttatattaagtatattatattttaagtttttttgttaaaaaggaggtagagttttttagttttgggatttttgaatgttttagttttttgtagttttgatgtttttggattgggtttggg

SEQ ID NO: 5139 - DNA, 120 bp, synthetic construct
  source 1..120: mol_type = other DNA
ctaaacacattatactctaaatcttctcaccaaaaaaaaaacaaaatttttcaactcactataacctaaaattcctaaatatcccaacttcctataaccttaatatccccaaactaaatc

SEQ ID NO: 5140 - DNA, 120 bp, synthetic construct
  source 1..120: mol_type = other DNA
ttaagtatattatattttaagtttttttgttaaaaaggaggtagagttttttagtttattatggtttgggatttttgaatgttttagttttttgtagttttgatgtttttggattgggtt

SEQ ID NO: 5141 - DNA, 120 bp, synthetic construct
  source 1..120: mol_type = other DNA
ctacactaaacacattatactctaaatcttctcgccaaaaaaaaaacaaaatttttcaactctaaaattcctaaatatcccaacttcctataaccttaatatccccgaactaaatctaaa

SEQ ID NO: 5142 - DNA, 120 bp, synthetic construct
  source 1..120: mol_type = other DNA
ttatattaagtatattatattttaagttttttcgttaaaaaggaggtagagttttttagttttgggatttttgaatgttttagttttttgtagttttgatgttttcggattgggtttggg

SEQ ID NO: 5143 - DNA, 120 bp, synthetic construct
  source 1..120: mol_type = other DNA
ctaaacacattatactctaaatcttctcgccaaaaaaaaaacaaaatttttcaactcactataacctaaaattcctaaatatcccaacttcctataaccttaatatccccgaactaaatc

SEQ ID NO: 5144 - DNA, 120 bp, synthetic construct
  source 1..120: mol_type = other DNA
ttaagtatattatattttaagttttttcgttaaaaaggaggtagagttttttagtttattatggtttgggatttttgaatgttttagttttttgtagttttgatgttttcggattgggtt

SEQ ID NO: 5145 - DNA, 120 bp, synthetic construct
  source 1..120: mol_type = other DNA
aaacaaaactaatattcataaaaataaaaaaattttccaataaatccccaaataactaatcaaaaattatctcaacatctacattcttttcataaccacaccaaaaacaatacaaaacta

SEQ ID NO: 5146 - DNA, 120 bp, synthetic construct
  source 1..120: mol_type = other DNA
agataaaattgatgtttatgaaagtgaaggaattttttagtaaatttttagatagttggttaggaattgttttaatatttatgttttttttatggttatattaaaggtgatgtaaaatta

SEQ ID NO: 5147 - DNA, 120 bp, synthetic construct
  source 1..120: mol_type = other DNA
aaaaaaacaaaactaatattcataaaaataaaaaaattttccaataaatccccaaataactattatctcaacatctacattcttttcataaccacaccaaaaacaatacaaaactatttc

SEQ ID NO: 5148 - DNA, 120 bp, synthetic construct
  source 1..120: mol_type = other DNA
aaggagataaaattgatgtttatgaaagtgaaggaattttttagtaaatttttagatagttattgttttaatatttatgttttttttatggttatattaaaggtgatgtaaaattatttt

SEQ ID NO: 5149 - DNA, 120 bp, synthetic construct
  source 1..120: mol_type = other DNA
aaacaaaactaatattcataaaaataaaaaaattttccaataaatccccaaataactaatcaaaaattatctcaacatctacgttcttttcataaccacaccaaaaacgatacaaaacta

SEQ ID NO: 5150 - DNA, 120 bp, synthetic construct
  source 1..120: mol_type = other DNA
agataaaattgatgtttatgaaagtgaaggaattttttagtaaatttttagatagttggttaggaattgttttaatatttacgttttttttatggttatattaaaggcgatgtaaaatta

SEQ ID NO: 5151 - DNA, 120 bp, synthetic construct
  source 1..120: mol_type = other DNA
aaaaaaacaaaactaatattcataaaaataaaaaaattttccaataaatccccaaataactattatctcaacatctacgttcttttcataaccacaccaaaaacgatacaaaactatttc

SEQ ID NO: 5152 - DNA, 120 bp, synthetic construct
  source 1..120: mol_type = other DNA
aaggagataaaattgatgtttatgaaagtgaaggaattttttagtaaatttttagatagttattgttttaatatttacgttttttttatggttatattaaaggcgatgtaaaattatttt

SEQ ID NO: 5153 - DNA, 120 bp, synthetic construct
  source 1..120: mol_type = other DNA
aatatcaataataaatataaaaaaacaacatcaaatatattaaaatatctcaaaatatctttcatcttatatttaaaaaaaaatactttaaacacataacttacactacaaaaataatat

SEQ ID NO: 5154 - DNA, 120 bp, synthetic construct
  source 1..120: mol_type = other DNA
agtattaatagtgggtatgaagaaataatattaaatgtgttaggatgttttagaatgttttttattttgtatttaggaaagaatattttggatatatggtttgtattgtaggagtggtat

SEQ ID NO: 5155 - DNA, 120 bp, synthetic construct
  source 1..120: mol_type = other DNA
caataataaatataaaaaaacaacatcaaatatattaaaatatctcaaaatatctttcaaaaacatcatcttatatttaaaaaaaaatactttaaacacataacttacactacaaaaata

SEQ ID NO: 5156 - DNA, 120 bp, synthetic construct
  source 1..120: mol_type = other DNA
taatagtgggtatgaagaaataatattaaatgtgttaggatgttttagaatgttttttagggatattattttgtatttaggaaagaatattttggatatatggtttgtattgtaggagtg

SEQ ID NO: 5157 - DNA, 120 bp, synthetic construct; identical to SEQ ID NO: 5153
  source 1..120: mol_type = other DNA

SEQ ID NO: 5158 - DNA, 120 bp, synthetic construct; identical to SEQ ID NO: 5154
  source 1..120: mol_type = other DNA

SEQ ID NO: 5159 - DNA, 120 bp, synthetic construct; identical to SEQ ID NO: 5155
  source 1..120: mol_type = other DNA

SEQ ID NO: 5160 - DNA, 120 bp, synthetic construct; identical to SEQ ID NO: 5156
  source 1..120: mol_type = other DNA

SEQ ID NO: 5161 - DNA, 120 bp, synthetic construct
  source 1..120: mol_type = other DNA
atttttaaacaaaaaaaaaataaattcatatttacctttcaaaaaaatcccccactaaaaaaaaaaaatcttattactccaaaaaaccaaaaaaaaaaaaaccaattataaaataaataa

SEQ ID NO: 5162 - DNA, 120 bp, synthetic construct
  source 1..120: mol_type = other DNA
atttttgagtaggagaggagtgggtttatgtttattttttagaaagattttttattgggagaagggggttttattgttttaagaagttagagaaagggagattagttgtggggtgggtgg

SEQ ID NO: 5163 - DNA, 120 bp, synthetic construct
  source 1..120: mol_type = other DNA
ccactatttttaaacaaaaaaaaaataaattcatatttacctttcaaaaaaatcccccactaatcttattactccaaaaaaccaaaaaaaaaaaaaccaattataaaataaataaattaa

SEQ ID NO: 5164 - DNA, 120 bp, synthetic construct
  source 1..120: mol_type = other DNA
ttattatttttgagtaggagaggagtgggtttatgtttattttttagaaagattttttattggttttattgttttaagaagttagagaaagggagattagttgtggggtgggtgggttgg

SEQ ID NO: 5165 - DNA, 120 bp, synthetic construct; identical to SEQ ID NO: 5161
  source 1..120: mol_type = other DNA

SEQ ID NO: 5166 - DNA, 120 bp, synthetic construct; identical to SEQ ID NO: 5162
  source 1..120: mol_type = other DNA

SEQ ID NO: 5167 - DNA, 120 bp, synthetic construct; identical to SEQ ID NO: 5163
  source 1..120: mol_type = other DNA

SEQ ID NO: 5168 - DNA, 120 bp, synthetic construct; identical to SEQ ID NO: 5164
  source 1..120: mol_type = other DNA

SEQ ID NO: 5169 - DNA, 120 bp, synthetic construct
  source 1..120: mol_type = other DNA
tttattctaatataaaaacctaaaatcatcaaaataccttaaccactcatcccctaacttcataatcttttcatcattctcaaaaaccaaatatttcctatcaccacacatcacaatctc

SEQ ID NO: 5170 - DNA, 120 bp, synthetic construct
  source 1..120: mol_type = other DNA
tttgttttaatatgaaaatttaaggttattaagatattttgattgtttattttttgattttatggtttttttattatttttagagattagatgttttttgttattatatattatagtttt

SEQ ID NO: 5171 - DNA, 120 bp, synthetic construct
  source 1..120: mol_type = other DNA
tctaatataaaaacctaaaatcatcaaaataccttaaccactcatcccctaacttcataaaaaaatataatcttttcatcattctcaaaaaccaaatatttcctatcaccacacatcaca

SEQ ID NO: 5172 - DNA, 120 bp, synthetic construct
  source 1..120: mol_type = other DNA
tttaatatgaaaatttaaggttattaagatattttgattgtttattttttgattttatgaaagaatatggtttttttattatttttagagattagatgttttttgttattatatattata

SEQ ID NO: 5173 - DNA, 120 bp, synthetic construct
  source 1..120: mol_type = other DNA
tttattctaatataaaaacctaaaatcatcaaaataccttaaccgctcatcccctaacttcataatcttttcatcattctcaaaaaccaaatatttcctatcaccacacatcacaatctc

SEQ ID NO: 5174 - DNA, 120 bp, synthetic construct
  source 1..120: mol_type = other DNA
tttgttttaatatgaaaatttaaggttattaagatattttgatcgtttattttttgattttatggtttttttattatttttagagattagatgttttttgttattatatattatagtttt

SEQ ID NO: 5175 - DNA, 120 bp, synthetic construct
  source 1..120: mol_type = other DNA
tctaatataaaaacctaaaatcatcaaaataccttaaccgctcatcccctaacttcataaaaaaatataatcttttcatcattctcaaaaaccaaatatttcctatcaccacacatcaca

SEQ ID NO: 5176 - DNA, 120 bp, synthetic construct
  source 1..120: mol_type = other DNA
tttaatatgaaaatttaaggttattaagatattttgatcgtttattttttgattttatgaaagaatatggtttttttattatttttagagattagatgttttttgttattatatattata

SEQ ID NO: 5177 - DNA, 120 bp, synthetic construct
  source 1..120: mol_type = other DNA
aactaacaacttacctacaaaaactaaacttcctaatactccaaaattaaaatataacaaataaaaatttaactattaaatttcaatttcataaaaaaataaaacctataaaaaaaaaaa

SEQ ID NO: 5178 - DNA, 120 bp, synthetic construct
  source 1..120: mol_type = other DNA
gattgatagtttgtttgtaagggttggattttttgatgttttaaaattgaaatataataaataaggatttggttattgaattttaattttataagaaaatgggatttgtaagagggagag

SEQ ID NO: 5179 - DNA, 120 bp, synthetic construct
  source 1..120: mol_type = other DNA
aacaacttacctacaaaaactaaacttcctaatactccaaaattaaaatataacaaataactacctaaaaatttaactattaaatttcaatttcataaaaaaataaaacctataaaaaaa

SEQ ID NO: 5180 - DNA, 120 bp, synthetic construct
  source 1..120: mol_type = other DNA
gatagtttgtttgtaagggttggattttttgatgttttaaaattgaaatataataaataattgtttaaggatttggttattgaattttaattttataagaaaatgggatttgtaagaggg

SEQ ID NO: 5181 - DNA, 120 bp, synthetic construct; identical to SEQ ID NO: 5177
  source 1..120: mol_type = other DNA

SEQ ID NO: 5182 - DNA, 120 bp, synthetic construct; identical to SEQ ID NO: 5178
  source 1..120: mol_type = other DNA

SEQ ID NO: 5183 - DNA, 120 bp, synthetic construct; identical to SEQ ID NO: 5179
  source 1..120: mol_type = other DNA

SEQ ID NO: 5184 - DNA, 120 bp, synthetic construct; identical to SEQ ID NO: 5180
  source 1..120: mol_type = other DNA

SEQ ID NO: 5185 - DNA, 120 bp, synthetic construct
  source 1..120: mol_type = other DNA
ctaaactcctatctaaaaataaaattcctaaccaaaaaaaaaactaacaaaaacaaacaaaattctcaacttaaaaaaactcaaaccaattatttcatcaaacattcaaacaaaaaaata

SEQ ID NO: 5186 - DNA, 120 bp, synthetic construct
  source 1..120: mol_type = other DNA
ttagatttttatttggggataggatttttaattaggagaagaattggtagaagtaagtagagtttttaatttagagagatttgggttaattattttattaggtatttaggtgagaaagtg

SEQ ID NO: 5187 - DNA, 120 bp, synthetic construct
  source 1..120: mol_type = other DNA
aactctaaactcctatctaaaaataaaattcctaaccaaaaaaaaaactaacaaaaacaaacaacttaaaaaaactcaaaccaattatttcatcaaacattcaaacaaaaaaatatccaa

SEQ ID NO: 5188 - DNA, 120 bp, synthetic construct
  source 1..120: mol_type = other DNA
agttttagatttttatttggggataggatttttaattaggagaagaattggtagaagtaagtaatttagagagatttgggttaattattttattaggtatttaggtgagaaagtgtttaa

SEQ ID NO: 5189 - DNA, 120 bp, synthetic construct
  source 1..120: mol_type = other DNA
ctaaactcctatctaaaaataaaattcctaaccaaaaaaaaaactaacaaaaacaaacaaaattctcaacttaaaaaaactcgaaccaattatttcatcaaacattcaaacgaaaaaata

SEQ ID NO: 5190 - DNA, 120 bp, synthetic construct
  source 1..120: mol_type = other DNA
ttagatttttatttggggataggatttttaattaggagaagaattggtagaagtaagtagagtttttaatttagagagattcgggttaattattttattaggtatttaggcgagaaagtg

SEQ ID NO: 5191 - DNA, 120 bp, synthetic construct
  source 1..120: mol_type = other DNA
aactctaaactcctatctaaaaataaaattcctaaccaaaaaaaaaactaacaaaaacaaacaacttaaaaaaactcgaaccaattatttcatcaaacattcaaacgaaaaaatatccaa

SEQ ID NO: 5192 - DNA, 120 bp, synthetic construct
  source 1..120: mol_type = other DNA
agttttagatttttatttggggataggatttttaattaggagaagaattggtagaagtaagtaatttagagagattcgggttaattattttattaggtatttaggcgagaaagtgtttaa

SEQ ID NO: 5193 - DNA, 120 bp, synthetic construct
  source 1..120: mol_type = other DNA
taaaatcacaacctcctttattataaacctactctaaaaaaatacacaaacaaataaacctctacaaaaacctcacaaactaccaacctacccaaaaatcccaaaaaatccaaattcaaa

SEQ ID NO: 5194 - DNA, 120 bp, synthetic construct
  source 1..120: mol_type = other DNA
tggggttatagttttttttgttatggatttattttggaaaaatgtatagataggtaaatttttgtggaagttttatagattgttagtttatttagggattttgggaggtttaagtttaga

SEQ ID NO: 5195 - DNA, 120 bp, synthetic construct
  source 1..120: mol_type = other DNA
tcacaacctcctttattataaacctactctaaaaaaatacacaaacaaataaacctccacaactactacaaaaacctcacaaactaccaacctacccaaaaatcccaaaaaatccaaatt

SEQ ID NO: 5196 - DNA, 120 bp, synthetic construct
  source 1..120: mol_type = other DNA
ttatagttttttttgttatggatttattttggaaaaatgtatagataggtaaatttttataattattgtggaagttttatagattgttagtttatttagggattttgggaggtttaagtt

SEQ ID NO: 5197 - DNA, 120 bp, synthetic construct
  source 1..120: mol_type = other DNA
taaaatcacaacctcctttattataaacctactctaaaaaaatacacaaacaaataaacctctacgaaaacctcacaaactaccaacctacccaaaaatcccgaaaaatccaaattcaaa

SEQ ID NO: 5198 - DNA, 120 bp, synthetic construct
  source 1..120: mol_type = other DNA
tggggttatagttttttttgttatggatttattttggaaaaatgtatagataggtaaatttttgcggaagttttatagattgttagtttatttagggatttcgggaggtttaagtttaga

SEQ ID NO: 5199 - DNA, 120 bp, synthetic construct
  source 1..120: mol_type = other DNA
tcacaacctcctttattataaacctactctaaaaaaatacacaaacaaataaacctccacaactactacgaaaacctcacaaactaccaacctacccaaaaatcccgaaaaatccaaatt

SEQ ID NO: 5200 - DNA, 120 bp, synthetic construct
  source 1..120: mol_type = other DNA
ttatagttttttttgttatggatttattttggaaaaatgtatagataggtaaatttttataattattgcggaagttttatagattgttagtttatttagggatttcgggaggtttaagtt

SEQ ID NO: 5201 - DNA, 120 bp, synthetic construct
  source 1..120: mol_type = other DNA
aaattacactctaaaaaatccaaataaaatataaataaaaatttctaaaaactaatattttaacaatataacatataatatatattactttacaaattacaaaaccattattttaaaaat

SEQ ID NO: 5202 - DNA, 120 bp, synthetic construct
  source 1..120: mol_type = other DNA
aaattatattttggaaaatttaagtgaagtataagtaaaggtttttgaaggttggtattttagtagtatggtatgtagtatatgttgttttataaattatagggttattgttttgaaaat

SEQ ID NO: 5203 - DNA, 120 bp, synthetic construct
  source 1..120: mol_type = other DNA
aaaaaaattacactctaaaaaatccaaataaaatataaataaaaatttctaaaaactaatatataacatataatatatattactttacaaattacaaaaccattattttaaaaattacaa

SEQ ID NO: 5204 - DNA, 120 bp, synthetic construct
  source 1..120: mol_type = other DNA
gaaaaaattatattttggaaaatttaagtgaagtataagtaaaggtttttgaaggttggtatatggtatgtagtatatgttgttttataaattatagggttattgttttgaaaattatag

SEQ ID NO: 5205 - DNA, 120 bp, synthetic construct; identical to SEQ ID NO: 5201
  source 1..120: mol_type = other DNA

SEQ ID NO: 5206 - DNA, 120 bp, synthetic construct; identical to SEQ ID NO: 5202
  source 1..120: mol_type = other DNA

SEQ ID NO: 5207 - DNA, 120 bp, synthetic construct; identical to SEQ ID NO: 5203
  source 1..120: mol_type = other DNA

SEQ ID NO: 5208 - DNA, 120 bp, synthetic construct; identical to SEQ ID NO: 5204
  source 1..120: mol_type = other DNA

SEQ ID NO: 5209 - DNA, 120 bp, synthetic construct
  source 1..120: mol_type = other DNA
atataacttataatcaatatttccataaataataaaaaatataattatttacttcatatttatttttcataacacttttaaaaaaaaaccatattaacaacatacaaattttattaccaa

SEQ ID NO: 5210 - DNA, 120 bp, synthetic construct
  source 1..120: mol_type = other DNA
atataatttataattaatgtttttatggataatggaaaatgtgattatttattttatatttattttttataatatttttaagaaaaagttatgttagtaatatatggattttgttgttag

SEQ ID NO: 5211 - DNA, 120 bp, synthetic construct
  source 1..120: mol_type = other DNA
acttataatcaatatttccataaataataaaaaatataattatttacttcatatttaaaaaataaatttttcataacacttttaaaaaaaaaccatattaacaacatacaaattttatta

SEQ ID NO: 5212 - DNA, 120 bp, synthetic construct
  source 1..120: mol_type = other DNA
atttataattaatgtttttatggataatggaaaatgtgattatttattttatatttaaaaaataaattttttataatatttttaagaaaaagttatgttagtaatatatggattttgttg

SEQ ID NO: 5213 - DNA, 120 bp, synthetic construct
  source 1..120: mol_type = other DNA
atataacttataatcaatatttccataaataataaaaaatataattatttacttcatatttatttttcataacacttttaaaaaaaaaccatattaacaacatacgaattttattaccaa

SEQ ID NO: 5214 - DNA, 120 bp, synthetic construct
  source 1..120: mol_type = other DNA
atataatttataattaatgtttttatggataatggaaaatgtgattatttattttatatttattttttataatatttttaagaaaaagttatgttagtaatatacggattttgttgttag

SEQ ID NO: 5215 - DNA, 120 bp, synthetic construct
  source 1..120: mol_type = other DNA
acttataatcaatatttccataaataataaaaaatataattatttacttcatatttaaaaaataaatttttcataacacttttaaaaaaaaaccatattaacaacatacgaattttatta

SEQ ID NO: 5216 - DNA, 120 bp, synthetic construct
  source 1..120: mol_type = other DNA
atttataattaatgtttttatggataatggaaaatgtgattatttattttatatttaaaaaataaattttttataatatttttaagaaaaagttatgttagtaatatacggattttgttg

SEQ ID NO: 5217 - DNA, 120 bp, synthetic construct
  source 1..120: mol_type = other DNA
tattaaaactttcacataaaaaacaaatattaaaaataaaaatcaaaaacttactaaacattattacaaaacaaaaataaattaaatattaaacctaataaaactacaaataccatttaa

SEQ ID NO: 5218 - DNA, 120 bp, synthetic construct
  source 1..120: mol_type = other DNA
tattagaatttttatataaaaagtaagtattaaagatagggattgaaaatttgttaggtattattgtaaaatagaaataaattgaatgttaagtttggtaagattgtaaatgttatttga

SEQ ID NO: 5219 - DNA, 120 bp, synthetic construct
  source 1..120: mol_type = other DNA
tttttattaaaactttcacataaaaaacaaatattaaaaataaaaatcaaaaacttactaaacaaaacaaaaataaattaaatattaaacctaataaaactacaaataccatttaaaatt

SEQ ID NO: 5220 - DNA, 120 bp, synthetic construct
  source 1..120: mol_type = other DNA
tttttattagaatttttatataaaaagtaagtattaaagatagggattgaaaatttgttaggtaaaatagaaataaattgaatgttaagtttggtaagattgtaaatgttatttgagatt

SEQ ID NO: 5221 - DNA, 120 bp, synthetic construct
  source 1..120: mol_type = other DNA
tattaaaactttcacataaaaaacaaatattaaaaataaaaatcgaaaacttactaaacattattacaaaacaaaaataaattaaatattaaacctaataaaactacaaataccatttaa

SEQ ID NO: 5222 - DNA, 120 bp, synthetic construct
  source 1..120: mol_type = other DNA
tattagaatttttatataaaaagtaagtattaaagatagggatcgaaaatttgttaggtattattgtaaaatagaaataaattgaatgttaagtttggtaagattgtaaatgttatttga

SEQ ID NO: 5223 - DNA, 120 bp, synthetic construct
  source 1..120: mol_type = other DNA
tttttattaaaactttcacataaaaaacaaatattaaaaataaaaatcgaaaacttactaaacaaaacaaaaataaattaaatattaaacctaataaaactacaaataccatttaaaatt

SEQ ID NO: 5224 - DNA, 120 bp, synthetic construct
  source 1..120: mol_type = other DNA
tttttattagaatttttatataaaaagtaagtattaaagatagggatcgaaaatttgttaggtaaaatagaaataaattgaatgttaagtttggtaagattgtaaatgttatttgagatt

SEQ ID NO: 5225 - DNA, 120 bp, synthetic construct
  source 1..120: mol_type = other DNA
aaacaaaacaaaaaacccatccaaaaacaataatctctataaacaaaaaaacaaataaaaataccaaataaaatatacccttaatttataaaaatatcccaaacaatattaccataaaaa

SEQ ID NO: 5226 - DNA, 120 bp, synthetic construct
  source 1..120: mol_type = other DNA
aggtaaaatagaaaatttgtttagaagtagtaatttttataaataaagagataaataaaaatattaggtggaatatgtttttgatttgtgaaaatattttaagtaatattgttataaaag

SEQ ID NO: 5227 - DNA, 120 bp, synthetic construct
  source 1..120: mol_type = other DNA
aaaacaaaaaacccatccaaaaacaataatctctataaacaaaaaaacaaataaaaataaaaattaccaaataaaatatacccttaatttataaaaatatcccaaacaatattaccataa

SEQ ID NO: 5228 - DNA, 120 bp, synthetic construct
  source 1..120: mol_type = other DNA
aaaatagaaaatttgtttagaagtagtaatttttataaataaagagataaataaaaatgagggttattaggtggaatatgtttttgatttgtgaaaatattttaagtaatattgttataa

SEQ ID NO: 5229 - DNA, 120 bp, synthetic construct
  source 1..120: mol_type = other DNA
aaacaaaacaaaaaacccgtccaaaaacaataatctctataaacaaaaaaacaaataaaaataccaaataaaatatacccttaatttataaaaatatcccaaacaatattaccataaaaa

SEQ ID NO: 5230 - DNA, 120 bp, synthetic construct
  source 1..120: mol_type = other DNA
aggtaaaatagaaaattcgtttagaagtagtaatttttataaataaagagataaataaaaatattaggtggaatatgtttttgatttgtgaaaatattttaagtaatattgttataaaag

SEQ ID NO: 5231 - DNA, 120 bp, synthetic construct
  source 1..120: mol_type = other DNA
aaaacaaaaaacccgtccaaaaacaataatctctataaacaaaaaaacaaataaaaataaaaattaccaaataaaatatacccttaatttataaaaatatcccaaacaatattaccataa

SEQ ID NO: 5232 - DNA, 120 bp, synthetic construct
  source 1..120: mol_type = other DNA
aaaatagaaaattcgtttagaagtagtaatttttataaataaagagataaataaaaatgagggttattaggtggaatatgtttttgatttgtgaaaatattttaagtaatattgttataa

SEQ ID NO: 5233 - DNA, 120 bp, synthetic construct
  source 1..120: mol_type = other DNA
tccactaaaattaacactaatcaaaaataacaaaaactcccaccctcacaaaaaaaaaaaactccaacctcattacaaaaaacccaaaaaaaaatcctaaaaacaaccctaaaaaaaaat

SEQ ID NO: 5234 - DNA, 120 bp, synthetic construct
  source 1..120: mol_type = other DNA
tttattgaggttgatattggttagaggtggtagaggtttttatttttatagagaggaggagttttagttttattgtaggaggtttagggagaagttttgagaatagttttgagagaaggt

SEQ ID NO: 5235 - DNA, 120 bp, synthetic construct
  source 1..120: mol_type = other DNA
ctaaaattaacactaatcaaaaataacaaaaactcccaccctcacaaaaaaaaaaaactcaaccctccaacctcattacaaaaaacccaaaaaaaaatcctaaaaacaaccctaaaaaaa

SEQ ID NO: 5236 - DNA, 120 bp, synthetic construct
  source 1..120: mol_type = other DNA
ttgaggttgatattggttagaggtggtagaggtttttatttttatagagaggaggagtttggttttttagttttattgtaggaggtttagggagaagttttgagaatagttttgagagaa

SEQ ID NO: 5237 - DNA, 120 bp, synthetic construct; identical to SEQ ID NO: 5233
  source 1..120: mol_type = other DNA

SEQ ID NO: 5238 - DNA, 120 bp, synthetic construct; identical to SEQ ID NO: 5234
  source 1..120: mol_type = other DNA

SEQ ID NO: 5239 - DNA, 120 bp, synthetic construct
  source 1..120: mol_type = other DNA
ctaaaattaacactaatcaaaaataacaaaaactcccaccctcacaaaaaaaaaaaactcgaccctccaacctcattacaaaaaacccaaaaaaaaatcctaaaaacaaccctaaaaaaa

SEQ ID NO: 5240 - DNA, 120 bp, synthetic construct
  source 1..120: mol_type = other DNA
ttgaggttgatattggttagaggtggtagaggtttttatttttatagagaggaggagttcggttttttagttttattgtaggaggtttagggagaagttttgagaatagttttgagagaa

SEQ ID NO: 5241 - DNA, 120 bp, synthetic construct
  source 1..120: mol_type = other DNA
aaccttaccaataacacaactaaaacactctttactcataataaaaaataactttaaataatatcaatctttaaaaacaattaaatttacattcttcatttaaaaaactaattaaaatat

SEQ ID NO: 5242 - DNA, 120 bp, synthetic construct
  source 1..120: mol_type = other DNA
aattttattagtgatatagttgggatattttttatttataatgaaagatgattttgaataatgttaatttttgaagatagttaaatttatattttttatttgggaaattagttgaagtgt

SEQ ID NO: 5243 - DNA, 120 bp, synthetic construct
  source 1..120: mol_type = other DNA
taccaataacacaactaaaacactctttactcataataaaaaataactttaaataatattctccctatcaatctttaaaaacaattaaatttacattcttcatttaaaaaactaattaaa

SEQ ID NO: 5244 - DNA, 120 bp, synthetic construct
  source 1..120: mol_type = other DNA
tattagtgatatagttgggatattttttatttataatgaaagatgattttgaataatgttttttttgttaatttttgaagatagttaaatttatattttttatttgggaaattagttgaa

SEQ ID NO: 5245 - DNA, 120 bp, synthetic construct; identical to SEQ ID NO: 5241
  source 1..120: mol_type = other DNA

SEQ ID NO: 5246 - DNA, 120 bp, synthetic construct; identical to SEQ ID NO: 5242
  source 1..120: mol_type = other DNA

SEQ ID NO: 5247 - DNA, 120 bp, synthetic construct; identical to SEQ ID NO: 5243
  source 1..120: mol_type = other DNA

SEQ ID NO: 5248 - DNA, 120 bp, synthetic construct; identical to SEQ ID NO: 5244
  source 1..120: mol_type = other DNA

SEQ ID NO: 5249 - DNA, 120 bp, synthetic construct
  source 1..120: mol_type = other DNA
ccaaaaaatttctaaaattaaaaaaaacactatttctcaatctttcaccaaacattaaaaaaataaaaaaaattataaataacaaaaatcaaattaaaaaaataaccatctcaattatca

SEQ ID NO: 5250 - DNA, 120 bp, synthetic construct
  source 1..120: mol_type = other DNA
ttaggagatttttggggttggaaaaggtattattttttagttttttattagatattgaaaaagtaagaaaggttgtgagtgataagaattaaattaagggaatgattattttaattgtta

SEQ ID NO: 5251 - DNA, 120 bp, synthetic construct
  source 1..120: mol_type = other DNA
aaaaaccaaaaaatttctaaaattaaaaaaaacactatttctcaatctttcaccaaacattaaaaaattataaataacaaaaatcaaattaaaaaaataaccatctcaattatcattata

SEQ ID NO: 5252 - DNA, 120 bp, synthetic construct
  source 1..120: mol_type = other DNA
agagattaggagatttttggggttggaaaaggtattattttttagttttttattagatattgaaaggttgtgagtgataagaattaaattaagggaatgattattttaattgttattata

SEQ ID NO: 5253 - DNA, 120 bp, synthetic construct; identical to SEQ ID NO: 5249
  source 1..120: mol_type = other DNA

SEQ ID NO: 5254 - DNA, 120 bp, synthetic construct; identical to SEQ ID NO: 5250
  source 1..120: mol_type = other DNA

SEQ ID NO: 5255 - DNA, 120 bp, synthetic construct; identical to SEQ ID NO: 5251
  source 1..120: mol_type = other DNA

SEQ ID NO: 5256 - DNA, 120 bp, synthetic construct; identical to SEQ ID NO: 5252
  source 1..120: mol_type = other DNA

SEQ ID NO: 5257 - DNA, 120 bp, synthetic construct
  source 1..120: mol_type = other DNA
ttttatcataaaaaatatatatatcatataatatttactacaaaaaaaatataatatttaacaaataatataatcaaaatttaactcctacctctctaataacaaaaaattctactcaca

SEQ ID NO: 5258 - DNA, 120 bp, synthetic construct
  source 1..120: mol_type = other DNA
ttttattataaaaaatatatatattatgtgatgtttattataaaagaaatgtagtatttaataagtagtgtaattagaatttggtttttgtttttttgatgatagaaagttttgtttata

SEQ ID NO: 5259 - DNA, 120 bp, synthetic construct
  source 1..120: mol_type = other DNA
aacattttatcataaaaaatatatatatcatataatatttactacaaaaaaaatataatattaatataatcaaaatttaactcctacctctctaataacaaaaaattctactcacaaatc

SEQ ID NO: 5260 - DNA, 120 bp, synthetic construct
  source 1..120: mol_type = other DNA
gatattttattataaaaaatatatatattatgtgatgtttattataaaagaaatgtagtattagtgtaattagaatttggtttttgtttttttgatgatagaaagttttgtttataggtt

SEQ ID NO: 5261 - DNA, 120 bp, synthetic construct; identical to SEQ ID NO: 5257
  source 1..120: mol_type = other DNA

SEQ ID NO: 5262 - DNA, 120 bp, synthetic construct; identical to SEQ ID NO: 5258
  source 1..120: mol_type = other DNA

SEQ ID NO: 5263 - DNA, 120 bp, synthetic construct; identical to SEQ ID NO: 5259
  source 1..120: mol_type = other DNA

SEQ ID NO: 5264 - DNA, 120 bp, synthetic construct; identical to SEQ ID NO: 5260
  source 1..120: mol_type = other DNA

SEQ ID NO: 5265 - DNA, 120 bp, synthetic construct
  source 1..120: mol_type = other DNA
taacctatcttcattcctaaaactctaaactctaaactcctaacttatctaaaaaaaaaataaccaaatactccttaaaaaaaattcatatacatcaactatcctctctttctcctattt

SEQ ID NO: 5266 - DNA, 120 bp, synthetic construct
  source 1..120: mol_type = other DNA
tgatttatttttatttttagagttttgaattttaggtttttagtttgtttgagaaggagataattgaatattttttggagaaggtttatgtatattaattgtttttttttttttttattt

SEQ ID NO: 5267 - DNA, 120 bp, synthetic construct
  source 1..120: mol_type = other DNA
aaataacctatcttcattcctaaaactctaaactctaaactcctaacttatctaaaaaaaaaaatactccttaaaaaaaattcatatacatcaactatcctctctttctcctatttaaac

SEQ ID NO: 5268 - DNA, 120 bp, synthetic construct
  source 1..120: mol_type = other DNA
aaatgatttatttttatttttagagttttgaattttaggtttttagtttgtttgagaaggagaatattttttggagaaggtttatgtatattaattgtttttttttttttttatttgagt

SEQ ID NO: 5269 - DNA, 120 bp, synthetic construct
  source 1..120: mol_type = other DNA
taacctatcttcattcctaaaactctaaactctaaactcctaacttatctaaaaaaaaaataaccgaatactccttaaaaaaaattcatatacatcaactatcctctctttctcctattt

SEQ ID NO: 5270 - DNA, 120 bp, synthetic construct
  source 1..120: mol_type = other DNA
tgatttatttttatttttagagttttgaattttaggtttttagtttgtttgagaaggagataatcgaatattttttggagaaggtttatgtatattaattgtttttttttttttttattt

SEQ ID NO: 5271 - DNA, 120 bp, synthetic construct; identical to SEQ ID NO: 5267
  source 1..120: mol_type = other DNA

SEQ ID NO: 5272 - DNA, 120 bp, synthetic construct; identical to SEQ ID NO: 5268
  source 1..120: mol_type = other DNA

SEQ ID NO: 5273 - DNA, 120 bp, synthetic construct
  source 1..120: mol_type = other DNA
aattcaaaatatattattacaataaaaaaatacaaataataaacatcacattttaaaaactaaaatcactaataacataaaattaaataaaaacaaataaataaaaaaaactatattaca

SEQ ID NO: 5274 - DNA, 120 bp, synthetic construct
  source 1..120: mol_type = other DNA
aatttaaggtatattattataatagagggatataagtaataaatattatattttaaagattaaaattattgataatataaaattgagtgaaaataaataaataagaaagattatattgta

SEQ ID NO: 5275 - DNA, 120 bp, synthetic construct
  source 1..120: mol_type = other DNA
aaaatatattattacaataaaaaaatacaaataataaacatcacattttaaaaactaatactttaaaaaatcactaataacataaaattaaataaaaacaaataaataaaaaaaactata

SEQ ID NO: 5276 - DNA, 120 bp, synthetic construct
  source 1..120: mol_type = other DNA
aaggtatattattataatagagggatataagtaataaatattatattttaaagattaatgttttggaaaattattgataatataaaattgagtgaaaataaataaataagaaagattata

SEQ ID NO: 5277 - DNA, 120 bp, synthetic construct; identical to SEQ ID NO: 5273
  source 1..120: mol_type = other DNA

SEQ ID NO: 5278 - DNA, 120 bp, synthetic construct; identical to SEQ ID NO: 5274
  source 1..120: mol_type = other DNA

SEQ ID NO: 5279 - DNA, 120 bp, synthetic construct; identical to SEQ ID NO: 5275
  source 1..120: mol_type = other DNA

SEQ ID NO: 5280 - DNA, 120 bp, synthetic construct; identical to SEQ ID NO: 5276
  source 1..120: mol_type = other DNA

SEQ ID NO: 5281 - DNA, 120 bp, synthetic construct
  source 1..120: mol_type = other DNA
attatttttctctcaaaaaaactaaaaacacttaattcaatactaaaaacaatactaaaataccctccatccctaaataactacaacaaaaacctacccattactccaaaaacaatatca

SEQ ID NO: 5282 - DNA, 120 bp, synthetic construct
  source 1..120: mol_type = other DNA
gttattttttttttaggagagttaggaatatttaatttgatattagaagtagtattaggatattttttatttttagatagttgtagtggagatttatttattattttaggggtagtgtta

SEQ ID NO: 5283 - DNA, 120 bp, synthetic construct
  source 1..120: mol_type = other DNA
tttttctctcaaaaaaactaaaaacacttaattcaatactaaaaacaatactaaaataaaatcaaaccctccatccctaaataactacaacaaaaacctacccattactccaaaaacaat

SEQ ID NO: 5284 - DNA, 120 bp, synthetic construct
  source 1..120: mol_type = other DNA
ttttttttttaggagagttaggaatatttaatttgatattagaagtagtattaggataaaattaaattttttatttttagatagttgtagtggagatttatttattattttaggggtagt

SEQ ID NO: 5285 - DNA, 120 bp, synthetic construct
  source 1..120: mol_type = other DNA
attatttttctctcaaaaaaactaaaaacacttaattcgatactaaaaacaatactaaaataccctccatccctaaataactacaacgaaaacctacccattactccaaaaacaatatca

SEQ ID NO: 5286 - DNA, 120 bp, synthetic construct
  source 1..120: mol_type = other DNA
gttattttttttttaggagagttaggaatatttaattcgatattagaagtagtattaggatattttttatttttagatagttgtagcggagatttatttattattttaggggtagtgtta

SEQ ID NO: 5287 - DNA, 120 bp, synthetic construct
  source 1..120: mol_type = other DNA
tttttctctcaaaaaaactaaaaacacttaattcgatactaaaaacaatactaaaataaaatcaaaccctccatccctaaataactacaacgaaaacctacccattactccaaaaacaat

SEQ ID NO: 5288 - DNA, 120 bp, synthetic construct
  source 1..120: mol_type = other DNA
ttttttttttaggagagttaggaatatttaattcgatattagaagtagtattaggataaaattaaattttttatttttagatagttgtagcggagatttatttattattttaggggtagt

SEQ ID NO: 5289 - DNA, 120 bp, synthetic construct
  source 1..120: mol_type = other DNA
aaaattcatactatttctactatactaacattttacaacttttcttttatttctaatccatctatccttttcacaaaattaaatacttataactctattaaaaattattataattattct

SEQ ID NO: 5290 - DNA, 120 bp, synthetic construct
  source 1..120: mol_type = other DNA
aaaatttatattatttttattatattagtattttataattttttttttgtttttggtttatttattttttttataagattaaatatttgtgattttattaaagattattgtaattatttt

SEQ ID NO: 5291 - DNA, 120 bp, synthetic construct
  source 1..120: mol_type = other DNA
ctccaaaattcatactatttctactatactaacattttacaacttttcttttatttctaatcttttcacaaaattaaatacttataactctattaaaaattattataattattctttcat

SEQ ID NO: 5292 - DNA, 120 bp, synthetic construct
  source 1..120: mol_type = other DNA
ttttaaaatttatattatttttattatattagtattttataattttttttttgtttttggtttttttataagattaaatatttgtgattttattaaagattattgtaattatttttttat

SEQ ID NO: 5293 - DNA, 120 bp, synthetic construct; identical to SEQ ID NO: 5289
  source 1..120: mol_type = other DNA

SEQ ID NO: 5294 - DNA, 120 bp, synthetic construct; identical to SEQ ID NO: 5290
  source 1..120: mol_type = other DNA

SEQ ID NO: 5295 - DNA, 120 bp, synthetic construct; identical to SEQ ID NO: 5291
  source 1..120: mol_type = other DNA

SEQ ID NO: 5296 - DNA, 120 bp, synthetic construct; identical to SEQ ID NO: 5292
  source 1..120: mol_type = other DNA

SEQ ID NO: 5297 - DNA, 120 bp, synthetic construct
  source 1..120: mol_type = other DNA
ctattattataatcaaataacttacacttcaacatataaattaaaaaattctatctttatttaaaataaaactcacaacaatattcaatatactttcttaaaacatttctctttactttc

SEQ ID NO: 5298 - DNA, 120 bp, synthetic construct
  source 1..120: mol_type = other DNA
ttattattatggttaaatgatttatattttggtatatagattgaagaattttgtttttatttaaagtgaaatttgtaataatgtttaatgtatttttttaaaatatttttttttgttttt

SEQ ID NO: 5299 - DNA, 120 bp, synthetic construct
  source 1..120: mol_type = other DNA
ctaactattattataatcaaataacttacacttcaacatataaattaaaaaattctatcttataaaactcacaacaatattcaatatactttcttaaaacatttctctttactttcttaa

SEQ ID NO: 5300 - DNA, 120 bp, synthetic construct
  source 1..120: mol_type = other DNA
ttggttattattatggttaaatgatttatattttggtatatagattgaagaattttgttttgtgaaatttgtaataatgtttaatgtatttttttaaaatatttttttttgtttttttaa

SEQ ID NO: 5301 - DNA, 120 bp, synthetic construct
  source 1..120: mol_type = other DNA
ctattattataatcaaataacttacacttcgacatataaattaaaaaattctatctttatttaaaataaaactcgcaacaatattcaatatactttcttaaaacatttctctttactttc

SEQ ID NO: 5302 - DNA, 120 bp, synthetic construct
  source 1..120: mol_type = other DNA
ttattattatggttaaatgatttatatttcggtatatagattgaagaattttgtttttatttaaagtgaaattcgtaataatgtttaatgtatttttttaaaatatttttttttgttttt

SEQ ID NO: 5303 - DNA, 120 bp, synthetic construct
  source 1..120: mol_type = other DNA
ctaactattattataatcaaataacttacacttcgacatataaattaaaaaattctatcttataaaactcgcaacaatattcaatatactttcttaaaacatttctctttactttcttaa

SEQ ID NO: 5304 - DNA, 120 bp, synthetic construct
  source 1..120: mol_type = other DNA
ttggttattattatggttaaatgatttatatttcggtatatagattgaagaattttgttttgtgaaattcgtaataatgtttaatgtatttttttaaaatatttttttttgtttttttaa

SEQ ID NO: 5305 - DNA, 120 bp, synthetic construct
  source 1..120: mol_type = other DNA
acacaacttttccttccccattaaatcaataatcactaattaccttattatactaatcaataactaaaccatatattacaacttaattacatttccttttttatatacttttcttcccct

SEQ ID NO: 5306 - DNA, 120 bp, synthetic construct
  source 1..120: mol_type = other DNA
atatagtttttttttttttattaaattagtggttattggttattttgttatgttagttaatagttgagttatgtattatggtttagttatatttttttttttgtatattttttttttttt

SEQ ID NO: 5307 - DNA, 120 bp, synthetic construct
  source 1..120: mol_type = other DNA
acttttccttccccattaaatcaataatcactaattaccttattatactaatcaataaaacccacaactaaaccatatattacaacttaattacatttccttttttatatacttttcttc

SEQ ID NO: 5308 - DNA, 120 bp, synthetic construct
  source 1..120: mol_type = other DNA
gtttttttttttttattaaattagtggttattggttattttgttatgttagttaataggatttatagttgagttatgtattatggtttagttatatttttttttttgtatattttttttt

SEQ ID NO: 5309 - DNA, 120 bp, synthetic construct
  source 1..120: mol_type = other DNA
acacaacttttccttccccattaaatcaataatcactaattaccttattatactaatcaataactaaaccatatattacgacttaattacatttccttttttatatacttttcttcccct

SEQ ID NO: 5310 - DNA, 120 bp, synthetic construct
  source 1..120: mol_type = other DNA
atatagtttttttttttttattaaattagtggttattggttattttgttatgttagttaatagttgagttatgtattacggtttagttatatttttttttttgtatattttttttttttt

SEQ ID NO: 5311 - DNA, 120 bp, synthetic construct
  source 1..120: mol_type = other DNA
acttttccttccccattaaatcaataatcactaattaccttattatactaatcaataaaacccacaactaaaccatatattacgacttaattacatttccttttttatatacttttcttc

SEQ ID NO: 5312 - DNA, 120 bp, synthetic construct
  source 1..120: mol_type = other DNA
gtttttttttttttattaaattagtggttattggttattttgttatgttagttaataggatttatagttgagttatgtattacggtttagttatatttttttttttgtatattttttttt

SEQ ID NO: 5313 - DNA, 120 bp, synthetic construct
  source 1..120: mol_type = other DNA
tttcaaattaatcaaataccctttacttccatccaattttctcaaacaaattctaataccttacaaaacaatattttttctctatccacttatatttatacattcttaaatatatatttt

SEQ ID NO: 5314 - DNA, 120 bp, synthetic construct
  source 1..120: mol_type = other DNA
ttttaaattgattagatgttttttgtttttatttagtttttttaaatagattttgatattttgtaaagtagtgttttttttttatttatttatatttgtgtgtttttggatatatatttt

SEQ ID NO: 5315 - DNA, 120 bp, synthetic construct
  source 1..120: mol_type = other DNA
aaattaatcaaataccctttacttccatccaattttctcaaacaaattctaataccttataaactacaaaacaatattttttctctatccacttatatttatacattcttaaatatatat

SEQ ID NO: 5316 - DNA, 120 bp, synthetic construct
  source 1..120: mol_type = other DNA
aaattgattagatgttttttgtttttatttagtttttttaaatagattttgatattttgtggattgtaaagtagtgttttttttttatttatttatatttgtgtgtttttggatatatat

SEQ ID NO: 5317 - DNA, 120 bp, synthetic construct
  source 1..120: mol_type = other DNA
tttcaaattaatcaaataccctttacttccatccaattttctcaaacaaattctaataccttacaaaacaatattttttctctatccacttatatttatacgttcttaaatatatatttt

SEQ ID NO: 5318 - DNA, 120 bp, synthetic construct
  source 1..120: mol_type = other DNA
ttttaaattgattagatgttttttgtttttatttagtttttttaaatagattttgatattttgtaaagtagtgttttttttttatttatttatatttgtgcgtttttggatatatatttt

SEQ ID NO: 5319 - DNA, 120 bp, synthetic construct
  source 1..120: mol_type = other DNA
aaattaatcaaataccctttacttccatccaattttctcaaacaaattctaataccttataaactacaaaacaatattttttctctatccacttatatttatacgttcttaaatatatat

SEQ ID NO: 5320 - DNA, 120 bp, synthetic construct
  source 1..120: mol_type = other DNA
aaattgattagatgttttttgtttttatttagtttttttaaatagattttgatattttgtggattgtaaagtagtgttttttttttatttatttatatttgtgcgtttttggatatatat

SEQ ID NO: 5321 - DNA, 120 bp, synthetic construct
  source 1..120: mol_type = other DNA
atcataaaactactaaataacaaaactcattaaacataaaactaaaattcaaccctaaatcaccataaaaccattttatttccataacatcataacattaattataacaccacaattatt

SEQ ID NO: 5322 - DNA, 120 bp, synthetic construct
  source 1..120: mol_type = other DNA
gttatagagttattaggtaatagagtttattgaatatggagttaggatttaattttggattgttgtgaagttattttgtttttatgatattatgatattggttataatattataattgtt

SEQ ID NO: 5323 - DNA, 120 bp, synthetic construct
  source 1..120: mol_type = other DNA
aaaaatcataaaactactaaataacaaaactcattaaacataaaactaaaattcaaccctaaaaaccattttatttccataacatcataacattaattataacaccacaattatttaaaa

SEQ ID NO: 5324 - DNA, 120 bp, synthetic construct
  source 1..120: mol_type = other DNA
aaaagttatagagttattaggtaatagagtttattgaatatggagttaggatttaattttggaagttattttgtttttatgatattatgatattggttataatattataattgtttagaa

SEQ ID NO: 5325 - DNA, 120 bp, synthetic construct
  source 1..120: mol_type = other DNA
atcataaaactactaaataacaaaactcattaaacataaaactaaaattcaaccctaaatcgccgtaaaaccattttatttccataacatcataacattaattataacaccacaattatt

SEQ ID NO: 5326 - DNA, 120 bp, synthetic construct
  source 1..120: mol_type = other DNA
gttatagagttattaggtaatagagtttattgaatatggagttaggatttaattttggatcgtcgtgaagttattttgtttttatgatattatgatattggttataatattataattgtt

SEQ ID NO: 5327 - DNA, 120 bp, synthetic construct; identical to SEQ ID NO: 5323
  source 1..120: mol_type = other DNA

SEQ ID NO: 5328 - DNA, 120 bp, synthetic construct; identical to SEQ ID NO: 5324
  source 1..120: mol_type = other DNA

SEQ ID NO: 5329 - DNA, 120 bp, synthetic construct
  source 1..120: mol_type = other DNA
atattctaaatatataaccttaatcatataacttaactcctcataaccccctttaccatatcaataaactaaaaataatatttacacaacacctaacttaatctctaataaaataaaaaa

SEQ ID NO: 5330 - DNA, 120 bp, synthetic construct
  source 1..120: mol_type = other DNA
atgttttgagtatatgattttggttatgtggtttaattttttatagttttttttattatattagtaaattggagatgatgtttgtataatatttaatttggtttttgatgaggtaggaga

SEQ ID NO: 5331 - DNA, 120 bp, synthetic construct
  source 1..120: mol_type = other DNA
tactatattctaaatatataaccttaatcatataacttaactcctcataaccccctttaccaaactaaaaataatatttacacaacacctaacttaatctctaataaaataaaaaaccaa

SEQ ID NO: 5332 - DNA, 120 bp, synthetic construct
  source 1..120: mol_type = other DNA
tgttatgttttgagtatatgattttggttatgtggtttaattttttatagttttttttattaaattggagatgatgtttgtataatatttaatttggtttttgatgaggtaggagattag

SEQ ID NO: 5333 - DNA, 120 bp, synthetic construct; identical to SEQ ID NO: 5329
  source 1..120: mol_type = other DNA

SEQ ID NO: 5334 - DNA, 120 bp, synthetic construct; identical to SEQ ID NO: 5330
  source 1..120: mol_type = other DNA

SEQ ID NO: 5335 - DNA, 120 bp, synthetic construct; identical to SEQ ID NO: 5331
  source 1..120: mol_type = other DNA

SEQ ID NO: 5336 - DNA, 120 bp, synthetic construct; identical to SEQ ID NO: 5332
  source 1..120: mol_type = other DNA

SEQ ID NO: 5337 - DNA, 120 bp, synthetic construct
  source 1..120: mol_type = other DNA
ctaaatttcaaaataactctcattttcacaaacctataatattctaaataataccaaccttcaaaaaataatttcacaaaataaattcttaaaaaataaaaaacattatataactcaaaa

SEQ ID NO: 5338 - DNA, 120 bp, synthetic construct
  source 1..120: mol_type = other DNA
ttgaattttaaagtaatttttatttttgtaggtttataatgttttaaatgatattaatttttaaggagtaattttatagaatgaatttttaggaagtaaagaatattatgtaatttagaa

SEQ ID NO: 5339 - DNA, 120 bp, synthetic construct
  source 1..120: mol_type = other DNA
tctatctaaatttcaaaataactctcattttcacaaacctataatattctaaataataccaaataatttcacaaaataaattcttaaaaaataaaaaacattatataactcaaaaataat

SEQ ID NO: 5340 - DNA, 120 bp, synthetic construct
  source 1..120: mol_type = other DNA
tttgtttgaattttaaagtaatttttatttttgtaggtttataatgttttaaatgatattaagtaattttatagaatgaatttttaggaagtaaagaatattatgtaatttagaaatagt

SEQ ID NO: 5341 - DNA, 120 bp, synthetic construct
  source 1..120: mol_type = other DNA
ctaaatttcaaaataactctcattttcgcaaacctataatattctaaataataccaaccttcaaaaaataatttcacaaaataaattcttaaaaaataaaaaacattatataactcaaaa

SEQ ID NO: 5342 - DNA, 120 bp, synthetic construct
  source 1..120: mol_type = other DNA
ttgaattttaaagtaatttttattttcgtaggtttataatgttttaaatgatattaatttttaaggagtaattttatagaatgaatttttaggaagtaaagaatattatgtaatttagaa

SEQ ID NO: 5343 - DNA, 120 bp, synthetic construct
  source 1..120: mol_type = other DNA
tctatctaaatttcaaaataactctcattttcgcaaacctataatattctaaataataccaaataatttcacaaaataaattcttaaaaaataaaaaacattatataactcaaaaataat

SEQ ID NO: 5344 - DNA, 120 bp, synthetic construct
  source 1..120: mol_type = other DNA
tttgtttgaattttaaagtaatttttattttcgtaggtttataatgttttaaatgatattaagtaattttatagaatgaatttttaggaagtaaagaatattatgtaatttagaaatagt

SEQ ID NO: 5345 - DNA, 120 bp, synthetic construct
  source 1..120: mol_type = other DNA
accccaatatttcccctataacctttctccatttaacaaacatttataataccaaaccacatactaccacctttatcataaaataacaactaaaatatataataaattaaaataacaact

SEQ ID NO: 5346 - DNA, 120 bp, synthetic construct
  source 1..120: mol_type = other DNA
attttagtgttttttttgtggtttttttttatttagtaaatatttatagtgttaggttatatattattatttttattataaagtgatagttaaaatatgtgatggattaaggtgatagtt

SEQ ID NO: 5347 - DNA, 120 bp, synthetic construct
  source 1..120: mol_type = other DNA
taaaaaccccaatatttcccctataacctttctccatttaacaaacatttataataccaaaccacctttatcataaaataacaactaaaatatataataaattaaaataacaactaaata

SEQ ID NO: 5348 - DNA, 120 bp, synthetic construct
  source 1..120: mol_type = other DNA
tggggattttagtgttttttttgtggtttttttttatttagtaaatatttatagtgttaggttatttttattataaagtgatagttaaaatatgtgatggattaaggtgatagttaaata

SEQ ID NO: 5349 - DNA, 120 bp, synthetic construct; identical to SEQ ID NO: 5345
  source 1..120: mol_type = other DNA

SEQ ID NO: 5350 - DNA, 120 bp, synthetic construct; identical to SEQ ID NO: 5346
  source 1..120: mol_type = other DNA

SEQ ID NO: 5351 - DNA, 120 bp, synthetic construct; identical to SEQ ID NO: 5347
  source 1..120: mol_type = other DNA

SEQ ID NO: 5352 - DNA, 120 bp, synthetic construct; identical to SEQ ID NO: 5348
  source 1..120: mol_type = other DNA

SEQ ID NO: 5353 - DNA, 120 bp, synthetic construct
  source 1..120: mol_type = other DNA
atttcatttaatccttaatacaatttactaaactaaataaatataattcttcctattcataaatacaaatatttaaaatcaaaaacattcaataacattttcaaaattataccaaataaa

SEQ ID NO: 5354 - DNA, 120 bp, synthetic construct
  source 1..120: mol_type = other DNA
attttatttaatttttagtgtaatttgttaaattaggtggatataattttttttatttatagatataagtatttagaattagaggtatttaataatatttttaggattatgttaaatggg

SEQ ID NO: 5355 - DNA, 120 bp, synthetic construct
  source 1..120: mol_type = other DNA
caatatttcatttaatccttaatacaatttactaaactaaataaatataattcttcctattcaaatatttaaaatcaaaaacattcaataacattttcaaaattataccaaataaatttt

SEQ ID NO: 5356 - DNA, 120 bp, synthetic construct
  source 1..120: mol_type = other DNA
taatattttatttaatttttagtgtaatttgttaaattaggtggatataattttttttatttaagtatttagaattagaggtatttaataatatttttaggattatgttaaatgggtttt

SEQ ID NO: 5357 - DNA, 120 bp, synthetic construct; identical to SEQ ID NO: 5353
  source 1..120: mol_type = other DNA

SEQ ID NO: 5358 - DNA, 120 bp, synthetic construct; identical to SEQ ID NO: 5354
  source 1..120: mol_type = other DNA

SEQ ID NO: 5359 - DNA, 120 bp, synthetic construct; identical to SEQ ID NO: 5355
  source 1..120: mol_type = other DNA

SEQ ID NO: 5360 - DNA, 120 bp, synthetic construct; identical to SEQ ID NO: 5356
  source 1..120: mol_type = other DNA

SEQ ID NO: 5361 - DNA, 120 bp, synthetic construct
  source 1..120: mol_type = other DNA
caaaattaaaatcctattaccacatatcatcccacataaaaactaaaatatcttcttaactaaatccaattttcatctatattcacaatatcaatatctctacattctcctattcttaaa

SEQ ID NO: 5362 - DNA, 120 bp, synthetic construct
  source 1..120: mol_type = other DNA
taaaattaaaattttgttattatgtattattttatatagaggttgaaatgtttttttgattaaatttagtttttatttatgtttatagtattaatgtttttatgtttttttgtttttgga

SEQ ID NO: 5363 - DNA, 120 bp, synthetic construct
  source 1..120: mol_type = other DNA
tttcaaaattaaaatcctattaccacatatcatcccacataaaaactaaaatatcttcttaccaattttcatctatattcacaatatcaatatctctacattctcctattcttaaacaaa

SEQ ID NO: 5364 - DNA, 120 bp, synthetic construct
  source 1..120: mol_type = other DNA
ttttaaaattaaaattttgttattatgtattattttatatagaggttgaaatgtttttttgttagtttttatttatgtttatagtattaatgtttttatgtttttttgtttttggatagg

SEQ ID NO: 5365 - DNA, 120 bp, synthetic construct
  source 1..120: mol_type = other DNA
caaaattaaaatcctattaccacgtatcatcccacataaaaactaaaatatcttcttaactaaatccaattttcatctatattcacaatatcaatatctctacgttctcctattcttaaa

SEQ ID NO: 5366 - DNA, 120 bp, synthetic construct
  source 1..120: mol_type = other DNA
taaaattaaaattttgttattacgtattattttatatagaggttgaaatgtttttttgattaaatttagtttttatttatgtttatagtattaatgtttttacgtttttttgtttttgga

SEQ ID NO: 5367 - DNA, 120 bp, synthetic construct
  source 1..120: mol_type = other DNA
tttcaaaattaaaatcctattaccacgtatcatcccacataaaaactaaaatatcttcttaccaattttcatctatattcacaatatcaatatctctacgttctcctattcttaaacaaa

SEQ ID NO: 5368 - DNA, 120 bp, synthetic construct
  source 1..120: mol_type = other DNA
ttttaaaattaaaattttgttattacgtattattttatatagaggttgaaatgtttttttgttagtttttatttatgtttatagtattaatgtttttacgtttttttgtttttggatagg

SEQ ID NO: 5369 - DNA, 120 bp, synthetic construct
  source 1..120: mol_type = other DNA
acacttaacaaaaaaaattaaaaaaaactacaaacttaaacaattctataaaattttaatacaattttcaacaaaattacacacacctaaattcacaaaaatactaaaacaattacatta

SEQ ID NO: 5370 - DNA, 120 bp, synthetic construct
  source 1..120: mol_type = other DNA
gtatttggtaaaaaggattggggggaattataaatttaagtaattttatggaattttaatatagtttttagtaaaattatatatgtttagatttataaagatgttgaagtagttatgtta

SEQ ID NO: 5371 - DNA, 120 bp, synthetic construct
  source 1..120: mol_type = other DNA
ttaacaaaaaaaattaaaaaaaactacaaacttaaacaattctataaaattttaatactatactcaattttcaacaaaattacacacacctaaattcacaaaaatactaaaacaattaca

SEQ ID NO: 5372 - DNA, 120 bp, synthetic construct
  source 1..120: mol_type = other DNA
ttggtaaaaaggattggggggaattataaatttaagtaattttatggaattttaatattgtgtttagtttttagtaaaattatatatgtttagatttataaagatgttgaagtagttatg

SEQ ID NO: 5373 - DNA, 120 bp, synthetic construct
  source 1..120: mol_type = other DNA
acacttaacaaaaaaaattaaaaaaaactacaaacttaaacaattctataaaattttaatacaattttcaacaaaattacacacgcctaaattcacaaaaatactaaaacaattacgtta

SEQ ID NO: 5374 - DNA, 120 bp, synthetic construct
  source 1..120: mol_type = other DNA
gtatttggtaaaaaggattggggggaattataaatttaagtaattttatggaattttaatatagtttttagtaaaattatatacgtttagatttataaagatgttgaagtagttacgtta

SEQ ID NO: 5375 - DNA, 120 bp, synthetic construct
  source 1..120: mol_type = other DNA
ttaacaaaaaaaattaaaaaaaactacaaacttaaacaattctataaaattttaatactatactcaattttcaacaaaattacacacgcctaaattcacaaaaatactaaaacaattacg

SEQ ID NO: 5376 - DNA, 120 bp, synthetic construct
  source 1..120: mol_type = other DNA
ttggtaaaaaggattggggggaattataaatttaagtaattttatggaattttaatattgtgtttagtttttagtaaaattatatacgtttagatttataaagatgttgaagtagttacg

SEQ ID NO: 5377 - DNA, 120 bp, synthetic construct
  source 1..120: mol_type = other DNA
aaataatatataacaatataatcatatcaaaataaaatatacatcaaaacctaaaaaaaaaaaaattttacataatcatatacatcaaaattaaaaaatataaaataactatatttaaaa

SEQ ID NO: 5378 - DNA, 120 bp, synthetic construct
  source 1..120: mol_type = other DNA
aaataatatatagtaatgtagttatattaaagtggaatatgtattaaagtttaaagaaagaagaattttgtataattatatgtattaaagttaaagaatatgggataattatgtttggaa

SEQ ID NO: 5379 - DNA, 120 bp, synthetic construct
  source 1..120: mol_type = other DNA
aatatataacaatataatcatatcaaaataaaatatacatcaaaacctaaaaaaaaaactattcaaaattttacataatcatatacatcaaaattaaaaaatataaaataactatattta

SEQ ID NO: 5380 - DNA, 120 bp, synthetic construct
  source 1..120: mol_type = other DNA
aatatatagtaatgtagttatattaaagtggaatatgtattaaagtttaaagaaagaattgtttagaattttgtataattatatgtattaaagttaaagaatatgggataattatgtttg

SEQ ID NO: 5381 - DNA, 120 bp, synthetic construct; identical to SEQ ID NO: 5377
  source 1..120: mol_type = other DNA

SEQ ID NO: 5382 - DNA, 120 bp, synthetic construct; identical to SEQ ID NO: 5378
  source 1..120: mol_type = other DNA

SEQ ID NO: 5383 - DNA, 120 bp, synthetic construct; identical to SEQ ID NO: 5379
  source 1..120: mol_type = other DNA

SEQ ID NO: 5384 - DNA, 120 bp, synthetic construct; identical to SEQ ID NO: 5380
  source 1..120: mol_type = other DNA

SEQ ID NO: 5385 - DNA, 120 bp, synthetic construct
  source 1..120: mol_type = other DNA
taacatcctaaaacttttctttatacaacccaacaaaaacaaaaaaaaaaaaaaaaaacaatatacaataaaatttaatcaacattatattctcaaataattaacatattaacaacacct

SEQ ID NO: 5386 - DNA, 120 bp, synthetic construct
  source 1..120: mol_type = other DNA
tggtattttgggatttttttttatataatttaataaggataaagagaaggaagggaagtaatatatagtagaatttggttaatattatgtttttagataattggtatgttaatagtattt

SEQ ID NO: 5387 - DNA, 120 bp, synthetic construct
  source 1..120: mol_type = other DNA
tcctaaaacttttctttatacaacccaacaaaaacaaaaaaaaaaaaaaaaaacaatatctatccttatacaataaaatttaatcaacattatattctcaaataattaacatattaacaa

SEQ ID NO: 5388 - DNA, 120 bp, synthetic construct
  source 1..120: mol_type = other DNA
ttttgggatttttttttatataatttaataaggataaagagaaggaagggaagtaatatttgtttttatatagtagaatttggttaatattatgtttttagataattggtatgttaatag

SEQ ID NO: 5389 - DNA, 120 bp, synthetic construct; identical to SEQ ID NO: 5385
  source 1..120: mol_type = other DNA

SEQ ID NO: 5390 - DNA, 120 bp, synthetic construct; identical to SEQ ID NO: 5386
  source 1..120: mol_type = other DNA

SEQ ID NO: 5391 - DNA, 120 bp, synthetic construct; identical to SEQ ID NO: 5387
  source 1..120: mol_type = other DNA

SEQ ID NO: 5392 - DNA, 120 bp, synthetic construct; identical to SEQ ID NO: 5388
  source 1..120: mol_type = other DNA

SEQ ID NO: 5393 - DNA, 120 bp, synthetic construct
  source 1..120: mol_type = other DNA
caaactataaatcaataaaaaaacaaatttaaaaatctaattatttaaatttttaattaattaaaaatttaaccataacctcaaatcaaaaataaaaaaatataaactaaatctactcta

SEQ ID NO: 5394 - DNA, 120 bp, synthetic construct
  source 1..120: mol_type = other DNA
taggttatgaattaatgggaaaatagatttagaaatttggttatttgaatttttagttggttggaaatttggttatagttttaggttagaaatggagagatataaattgagtttgtttta

SEQ ID NO: 5395 - DNA, 120 bp, synthetic construct
  source 1..120: mol_type = other DNA
tataaatcaataaaaaaacaaatttaaaaatctaattatttaaatttttaattaattatataacctaaaaatttaaccataacctcaaatcaaaaataaaaaaatataaactaaatctac

SEQ ID NO: 5396 - DNA, 120 bp, synthetic construct
  source 1..120: mol_type = other DNA
tatgaattaatgggaaaatagatttagaaatttggttatttgaatttttagttggttgtatagtttggaaatttggttatagttttaggttagaaatggagagatataaattgagtttgt

SEQ ID NO: 5397 - DNA, 120 bp, synthetic construct; identical to SEQ ID NO: 5393
  source 1..120: mol_type = other DNA

SEQ ID NO: 5398 - DNA, 120 bp, synthetic construct; identical to SEQ ID NO: 5394
  source 1..120: mol_type = other DNA

SEQ ID NO: 5399 - DNA, 120 bp, synthetic construct; identical to SEQ ID NO: 5395
  source 1..120: mol_type = other DNA

SEQ ID NO: 5400 - DNA, 120 bp, synthetic construct; identical to SEQ ID NO: 5396
  source 1..120: mol_type = other DNA

SEQ ID NO: 5401 - DNA, 120 bp, synthetic construct
  source 1..120: mol_type = other DNA
acccccacctctactaccaattcacataactatcaaacaaatactatattacccatactccacatcttcctaatccattaacaaaaactaaacattaaaaacctttcctaaaatttatta

SEQ ID NO: 5402 - DNA, 120 bp, synthetic construct
  source 1..120: mol_type = other DNA
gtttttatttttattgttagtttatatggttgttaaatagatgttatattatttatattttatatttttttggtttattggtagaggttggatattgggaattttttttgaggtttatta

SEQ ID NO: 5403 - DNA, 120 bp, synthetic construct
  source 1..120: mol_type = other DNA
aaaaacccccacctctactaccaattcacataactatcaaacaaatactatattacccatacttcctaatccattaacaaaaactaaacattaaaaacctttcctaaaatttattattat

SEQ ID NO: 5404 - DNA, 120 bp, synthetic construct
  source 1..120: mol_type = other DNA
aggagtttttatttttattgttagtttatatggttgttaaatagatgttatattatttatattttttggtttattggtagaggttggatattgggaattttttttgaggtttattattat

SEQ ID NO: 5405 - DNA, 120 bp, synthetic construct; identical to SEQ ID NO: 5401
  source 1..120: mol_type = other DNA

SEQ ID NO: 5406 - DNA, 120 bp, synthetic construct; identical to SEQ ID NO: 5402
  source 1..120: mol_type = other DNA

SEQ ID NO: 5407 - DNA, 120 bp, synthetic construct; identical to SEQ ID NO: 5403
  source 1..120: mol_type = other DNA

SEQ ID NO: 5408 - DNA, 120 bp, synthetic construct; identical to SEQ ID NO: 5404
  source 1..120: mol_type = other DNA

SEQ ID NO: 5409 - DNA, 120 bp, synthetic construct
  source 1..120: mol_type = other DNA
atataaataaatatctattcaaatatctataattaataaaatatcacaccaacaaatttaaactctaaatcttaattaattcattcaaaaaatatttattaaatcatacttattaccata

SEQ ID NO: 5410 - DNA, 120 bp, synthetic construct
  source 1..120: mol_type = other DNA
gtatggataggtatttatttaggtatttgtagttagtgagatattgtgttaataagtttaaattttaaattttgattgatttatttaggaaatatttattgagttatgtttgttattata

SEQ ID NO: 5411 - DNA, 120 bp, synthetic construct
  source 1..120: mol_type = other DNA
aaaatataaataaatatctattcaaatatctataattaataaaatatcacaccaacaaatttaaatcttaattaattcattcaaaaaatatttattaaatcatacttattaccataattt

SEQ ID NO: 5412 - DNA, 120 bp, synthetic construct
  source 1..120: mol_type = other DNA
aaagtatggataggtatttatttaggtatttgtagttagtgagatattgtgttaataagtttaaattttgattgatttatttaggaaatatttattgagttatgtttgttattataattt

SEQ ID NO: 5413 - DNA, 120 bp, synthetic construct
  source 1..120: mol_type = other DNA
atataaataaatatctattcaaatatctataattaataaaatatcgcgccaacaaatttaaactctaaatcttaattaattcattcaaaaaatatttattaaatcatacttattaccata

SEQ ID NO: 5414 - DNA, 120 bp, synthetic construct
  source 1..120: mol_type = other DNA
gtatggataggtatttatttaggtatttgtagttagtgagatatcgcgttaataagtttaaattttaaattttgattgatttatttaggaaatatttattgagttatgtttgttattata

SEQ ID NO: 5415 - DNA, 120 bp, synthetic construct
  source 1..120: mol_type = other DNA
aaaatataaataaatatctattcaaatatctataattaataaaatatcgcgccaacaaatttaaatcttaattaattcattcaaaaaatatttattaaatcatacttattaccataattt

SEQ ID NO: 5416 - DNA, 120 bp, synthetic construct
  source 1..120: mol_type = other DNA
aaagtatggataggtatttatttaggtatttgtagttagtgagatatcgcgttaataagtttaaattttgattgatttatttaggaaatatttattgagttatgtttgttattataattt

SEQ ID NO: 5417 - DNA, 120 bp, synthetic construct
  source 1..120: mol_type = other DNA
ttctttttctacatatctactaacattcacctctcaaaattctatatcccaaacaaataccactccaaaataccaaacctatctctaccttcaatcaacttccacataaatttccaaaac

SEQ ID NO: 5418 - DNA, 120 bp, synthetic construct
  source 1..120: mol_type = other DNA
ttttttttttatatgtttgttggtatttattttttaaggttttgtgttttaggtaaatgttattttaagatgttaggtttgtttttgtttttagttaatttttatgtgggtttttaaagt

SEQ ID NO: 5419 - DNA, 120 bp, synthetic construct
  source 1..120: mol_type = other DNA
ttttctacatatctactaacattcacctctcaaaattctatatcccaaacaaataccaaaaacaaactccaaaataccaaacctatctctaccttcaatcaacttccacataaatttcca

SEQ ID NO: 5420 - DNA, 120 bp, synthetic construct
  source 1..120: mol_type = other DNA
ttttttatatgtttgttggtatttattttttaaggttttgtgttttaggtaaatgttaggggtaaattttaagatgttaggtttgtttttgtttttagttaatttttatgtgggttttta

SEQ ID NO: 5421 - DNA, 120 bp, synthetic construct
  source 1..120: mol_type = other DNA
ttctttttctacatatctactaacattcacctctcaaaattctatatcccaaacaaataccactccaaaataccaaacctatctctaccttcaatcaacttccacgtaaatttccaaaac

SEQ ID NO: 5422 - DNA, 120 bp, synthetic construct
  source 1..120: mol_type = other DNA
ttttttttttatatgtttgttggtatttattttttaaggttttgtgttttaggtaaatgttattttaagatgttaggtttgtttttgtttttagttaatttttacgtgggtttttaaagt

SEQ ID NO: 5423 - DNA, 120 bp, synthetic construct
  source 1..120: mol_type = other DNA
ttttctacatatctactaacattcacctctcaaaattctatatcccaaacaaataccaaaaacaaactccaaaataccaaacctatctctaccttcaatcaacttccacgtaaatttcca

SEQ ID NO: 5424 - DNA, 120 bp, synthetic construct
  source 1..120: mol_type = other DNA
ttttttatatgtttgttggtatttattttttaaggttttgtgttttaggtaaatgttaggggtaaattttaagatgttaggtttgtttttgtttttagttaatttttacgtgggttttta

SEQ ID NO: 5425 - DNA, 120 bp, synthetic construct
  source 1..120: mol_type = other DNA
aaatataataaactaaacaccaatcaaaataataacaataaaaaaatatataaaacctatacataactaacaaatatataaaacctaaaaaaattctttaacatataaataataatataa

SEQ ID NO: 5426 - DNA, 120 bp, synthetic construct
  source 1..120: mol_type = other DNA
aaatatgatgggttaaatattaattagggtaataataataaaaagatatataagatttatgtatagttaatagatgtatgaaatttgaagaaattttttgatatataaatgataatataa

SEQ ID NO: 5427 - DNA, 120 bp, synthetic construct
  source 1..120: mol_type = other DNA
tttataaatataataaactaaacaccaatcaaaataataacaataaaaaaatatataaaacctaacaaatatataaaacctaaaaaaattctttaacatataaataataatataaaaaac

SEQ ID NO: 5428 - DNA, 120 bp, synthetic construct
  source 1..120: mol_type = other DNA
tttataaatatgatgggttaaatattaattagggtaataataataaaaagatatataagatttaatagatgtatgaaatttgaagaaattttttgatatataaatgataatataagagat

SEQ ID NO: 5429 - DNA, 120 bp, synthetic construct; identical to SEQ ID NO: 5425
  source 1..120: mol_type = other DNA

SEQ ID NO: 5430 - DNA, 120 bp, synthetic construct; identical to SEQ ID NO: 5426
  source 1..120: mol_type = other DNA

SEQ ID NO: 5431 - DNA, 120 bp, synthetic construct; identical to SEQ ID NO: 5427
  source 1..120: mol_type = other DNA

SEQ ID NO: 5432 - DNA, 120 bp, synthetic construct; identical to SEQ ID NO: 5428
  source 1..120: mol_type = other DNA

SEQ ID NO: 5433 - DNA, 120 bp, synthetic construct
  source 1..120: mol_type = other DNA
cctaatccttttcttaacctatactattaatatccttctccaatctccaccaaataatacttacttacttctaaacccttatcatcttcaaaatcctccatctttatttatactcttacc

SEQ ID NO: 5434 - DNA, 120 bp, synthetic construct
  source 1..120: mol_type = other DNA
tttgattttttttttagtttatgttgttggtatttttttttagtttttattggatagtgtttgtttgtttttgggtttttattatttttagagttttttatttttgtttatatttttatt

SEQ ID NO: 5435 - DNA, 120 bp, synthetic construct
  source 1..120: mol_type = other DNA
accacctaatccttttcttaacctatactattaatatccttctccaatctccaccaaataatacttctaaacccttatcatcttcaaaatcctccatctttatttatactcttacccaat

SEQ ID NO: 5436 - DNA, 120 bp, synthetic construct
  source 1..120: mol_type = other DNA
attgtttgattttttttttagtttatgttgttggtatttttttttagtttttattggatagtgtttttgggtttttattatttttagagttttttatttttgtttatatttttatttaat

SEQ ID NO: 5437 - DNA, 120 bp, synthetic construct
  source 1..120: mol_type = other DNA
cctaatccttttcttaacctatactattaatatccttctccaatctccaccgaataatacttacttacttctaaacccttatcatcttcaaaatcctccatctttatttatactcttacc

SEQ ID NO: 5438 - DNA, 120 bp, synthetic construct
  source 1..120: mol_type = other DNA
tttgattttttttttagtttatgttgttggtatttttttttagtttttatcggatagtgtttgtttgtttttgggtttttattatttttagagttttttatttttgtttatatttttatt

SEQ ID NO: 5439 - DNA, 120 bp, synthetic construct
  source 1..120: mol_type = other DNA
accgcctaatccttttcttaacctatactattaatatccttctccaatctccaccgaataatacttctaaacccttatcatcttcaaaatcctccatctttatttatactcttacccaat

SEQ ID NO: 5440 - DNA, 120 bp, synthetic construct
  source 1..120: mol_type = other DNA
atcgtttgattttttttttagtttatgttgttggtatttttttttagtttttatcggatagtgtttttgggtttttattatttttagagttttttatttttgtttatatttttatttaat

SEQ ID NO: 5441 - DNA, 120 bp, synthetic construct
  source 1..120: mol_type = other DNA
tctacaacttaatacttctataaatttacaatttatcttatactaacatctaaatcttttttacatataaaataacccaaaaaaaaaatatctctatatatacatttattttcttcctct

SEQ ID NO: 5442 - DNA, 120 bp, synthetic construct
  source 1..120: mol_type = other DNA
tttataatttagtgtttttgtaaatttgtagtttgttttgtgttagtatttaggttttttttgtatatgaagtaatttgaagaaagaatatttttatgtatgtatttgtttttttttttt

SEQ ID NO: 5443 - DNA, 120 bp, synthetic construct
  source 1..120: mol_type = other DNA
caacttaatacttctataaatttacaatttatcttatactaacatctaaatctttttctctaactacatataaaataacccaaaaaaaaaatatctctatatatacatttattttcttcc

SEQ ID NO: 5444 - DNA, 120 bp, synthetic construct
  source 1..120: mol_type = other DNA
taatttagtgtttttgtaaatttgtagtttgttttgtgttagtatttaggtttttttttttggttgtatatgaagtaatttgaagaaagaatatttttatgtatgtatttgttttttttt

SEQ ID NO: 5445 - DNA, 120 bp, synthetic construct
  source 1..120: mol_type = other DNA
tctacaacttaatacttctataaatttacaatttatcttatactaacatctaaatcttttttacatataaaataacccgaaaaaaaaatatctctatatatacatttattttcttcctct

SEQ ID NO: 5446 - DNA, 120 bp, synthetic construct
  source 1..120: mol_type = other DNA
tttataatttagtgtttttgtaaatttgtagtttgttttgtgttagtatttaggttttttttgtatatgaagtaattcgaagaaagaatatttttatgtatgtatttgtttttttttttt

SEQ ID NO: 5447 - DNA, 120 bp, synthetic construct
  source 1..120: mol_type = other DNA
caacttaatacttctataaatttacaatttatcttatactaacatctaaatctttttctctaactacatataaaataacccgaaaaaaaaatatctctatatatacatttattttcttcc

SEQ ID NO: 5448 - DNA, 120 bp, synthetic construct
  source 1..120: mol_type = other DNA
taatttagtgtttttgtaaatttgtagtttgttttgtgttagtatttaggtttttttttttggttgtatatgaagtaattcgaagaaagaatatttttatgtatgtatttgttttttttt

SEQ ID NO: 5449 - DNA, 120 bp, synthetic construct
  source 1..120: mol_type = other DNA
acctacatatatactacataactaaacatattttaaaaatacaaaataatctctatttataaaacttttaaatcatacttaccttccttctaaccaacacaaaataaaactcttatccaa

SEQ ID NO: 5450 - DNA, 120 bp, synthetic construct
  source 1..120: mol_type = other DNA
atttgtatatatattgtatagttgagtatattttaaaagtgtagaataatttttatttgtgaggtttttaaattatatttgttttttttttggttagtatagggtggagtttttatttag

SEQ ID NO: 5451 - DNA, 120 bp, synthetic construct
  source 1..120: mol_type = other DNA
catatatactacataactaaacatattttaaaaatacaaaataatctctatttataattttaaaaaaaacttttaaatcatacttaccttccttctaaccaacacaaaataaaactctta

SEQ ID NO: 5452 - DNA, 120 bp, synthetic construct
  source 1..120: mol_type = other DNA
tatatatattgtatagttgagtatattttaaaagtgtagaataatttttatttgtgattttggaaaaggtttttaaattatatttgttttttttttggttagtatagggtggagttttta

SEQ ID NO: 5453 - DNA, 120 bp, synthetic construct; identical to SEQ ID NO: 5449
  source 1..120: mol_type = other DNA

SEQ ID NO: 5454 - DNA, 120 bp, synthetic construct; identical to SEQ ID NO: 5450
  source 1..120: mol_type = other DNA

SEQ ID NO: 5455 - DNA, 120 bp, synthetic construct; identical to SEQ ID NO: 5451
  source 1..120: mol_type = other DNA

SEQ ID NO: 5456 - DNA, 120 bp, synthetic construct; identical to SEQ ID NO: 5452
  source 1..120: mol_type = other DNA

SEQ ID NO: 5457 - DNA, 120 bp, synthetic construct
  source 1..120: mol_type = other DNA
taatttaaaacatatcatacctttcacaaaactcttccttacatataattaaaactctattaattaaaaatatattaaacccaaatctataaataccaataaaattttcaatatcatata

SEQ ID NO: 5458 - DNA, 120 bp, synthetic construct
  source 1..120: mol_type = other DNA
taatttagagtatgttatattttttatagggtttttttttatatatgattgaaattttgttgattgaaaatgtgttgagtttaaatttgtgagtgttagtagggtttttaatgttatgta

SEQ ID NO: 5459 - DNA, 120 bp, synthetic construct
  source 1..120: mol_type = other DNA
taaaacatatcatacctttcacaaaactcttccttacatataattaaaactctattaattcaataaaattaaaaatatattaaacccaaatctataaataccaataaaattttcaatatc

SEQ ID NO: 5460 - DNA, 120 bp, synthetic construct
  source 1..120: mol_type = other DNA
tagagtatgttatattttttatagggtttttttttatatatgattgaaattttgttgatttgataagattgaaaatgtgttgagtttaaatttgtgagtgttagtagggtttttaatgtt

SEQ ID NO: 5461 - DNA, 120 bp, synthetic construct; identical to SEQ ID NO: 5457
  source 1..120: mol_type = other DNA

SEQ ID NO: 5462 - DNA, 120 bp, synthetic construct; identical to SEQ ID NO: 5458
  source 1..120: mol_type = other DNA

SEQ ID NO: 5463 - DNA, 120 bp, synthetic construct
  source 1..120: mol_type = other DNA
taaaacatatcatacctttcacaaaactcttccttacatataattaaaactctattaattcgataaaattaaaaatatattaaacccaaatctataaataccaataaaattttcaatatc

SEQ ID NO: 5464 - DNA, 120 bp, synthetic construct
  source 1..120: mol_type = other DNA
tagagtatgttatattttttatagggtttttttttatatatgattgaaattttgttgattcgataagattgaaaatgtgttgagtttaaatttgtgagtgttagtagggtttttaatgtt

SEQ ID NO: 5465 - DNA, 120 bp, synthetic construct
  source 1..120: mol_type = other DNA
aaaaaaactaaaccaaaaaacaaaactaaatttaaaacctacccctaaaacctacctatctataaaatcacaaccccaaaacctccttactataaacacccttccaaaaacctaacatca

SEQ ID NO: 5466 - DNA, 120 bp, synthetic construct
  source 1..120: mol_type = other DNA
gagggagttgagttgaggggtagagttgagtttagagtttgtttttgggatttgtttgtttgtgaagttatagttttaaagtttttttgttgtgagtatttttttaggagtttggtgtta

SEQ ID NO: 5467 - DNA, 120 bp, synthetic construct
  source 1..120: mol_type = other DNA
aactaaaccaaaaaacaaaactaaatttaaaacctacccctaaaacctacctatctccaatcaacataaaatcacaaccccaaaacctccttactataaacacccttccaaaaacctaac

SEQ ID NO: 5468 - DNA, 120 bp, synthetic construct
  source 1..120: mol_type = other DNA
agttgagttgaggggtagagttgagtttagagtttgtttttgggatttgtttgtttttgattggtgtgaagttatagttttaaagtttttttgttgtgagtatttttttaggagtttggt

SEQ ID NO: 5469 - DNA, 120 bp, synthetic construct
  source 1..120: mol_type = other DNA
aaaaaaactaaaccgaaaaacaaaactaaatttaaaacctacccctaaaacctacctatctataaaatcacaaccccaaaacctccttactataaacacccttccaaaaacctaacgtca

SEQ ID NO: 5470 - DNA, 120 bp, synthetic construct
  source 1..120: mol_type = other DNA
gagggagttgagtcgaggggtagagttgagtttagagtttgtttttgggatttgtttgtttgtgaagttatagttttaaagtttttttgttgtgagtatttttttaggagtttggcgtta

SEQ ID NO: 5471 - DNA, 120 bp, synthetic construct
  source 1..120: mol_type = other DNA
aactaaaccgaaaaacaaaactaaatttaaaacctacccctaaaacctacctatctccgatcgacgtaaaatcacaaccccaaaacctccttactataaacacccttccaaaaacctaac

SEQ ID NO: 5472 - DNA, 120 bp, synthetic construct
  source 1..120: mol_type = other DNA
agttgagtcgaggggtagagttgagtttagagtttgtttttgggatttgtttgttttcgatcggcgtgaagttatagttttaaagtttttttgttgtgagtatttttttaggagtttggc

SEQ ID NO: 5473 - DNA, 120 bp, synthetic construct
  source 1..120: mol_type = other DNA
cacaactcaaaaaacaaacttaaccaacaatcccatacaaattaaaaaaataaaacttacccaacactacttttcccccaaacctccccaactcttactaccaaactttcctaaaacctt

SEQ ID NO: 5474 - DNA, 120 bp, synthetic construct
  source 1..120: mol_type = other DNA
tatagtttagagagtaaatttggttggtagttttatgtagattagggagatggagtttgtttaatgttgttttttttttggatttttttggtttttgttgttagatttttttgaggtttt

SEQ ID NO: 5475 - DNA, 120 bp, synthetic construct
  source 1..120: mol_type = other DNA
tctcacaactcaaaaaacaaacttaaccaacaatcccatacaaattaaaaaaataaaacttactacttttcccccaaacctccccaactcttactaccaaactttcctaaaaccttactt

SEQ ID NO: 5476 - DNA, 120 bp, synthetic construct
  source 1..120: mol_type = other DNA
ttttatagtttagagagtaaatttggttggtagttttatgtagattagggagatggagtttgttgttttttttttggatttttttggtttttgttgttagatttttttgaggttttgttt

SEQ ID NO: 5477 - DNA, 120 bp, synthetic construct
  source 1..120: mol_type = other DNA
cacaactcaaaaaacaaacttaaccgacaatcccatacaaattaaaaaaataaaacttacccaacgctacttttcccccgaacctccccgactcttactaccaaactttcctaaaacctt

SEQ ID NO: 5478 - DNA, 120 bp, synthetic construct
  source 1..120: mol_type = other DNA
tatagtttagagagtaaatttggtcggtagttttatgtagattagggagatggagtttgtttaacgttgtttttttttcggattttttcggtttttgttgttagatttttttgaggtttt

SEQ ID NO: 5479 - DNA, 120 bp, synthetic construct
  source 1..120: mol_type = other DNA
tctcacaactcaaaaaacaaacttaaccgacaatcccatacaaattaaaaaaataaaacttactacttttcccccgaacctccccgactcttactaccaaactttcctaaaaccttactt

SEQ ID NO: 5480 - DNA, 120 bp, synthetic construct
  source 1..120: mol_type = other DNA
ttttatagtttagagagtaaatttggtcggtagttttatgtagattagggagatggagtttgttgtttttttttcggattttttcggtttttgttgttagatttttttgaggttttgttt

SEQ ID NO: 5481 - DNA, 120 bp, synthetic construct
  source 1..120: mol_type = other DNA
acacatacctctaactcctaaaatccactcttcctatcttcaataattaaccactactatccttaataccaaaaacctaaatattatccaatattcttcccaatctccattcaaaatcac

SEQ ID NO: 5482 - DNA, 120 bp, synthetic construct
  source 1..120: mol_type = other DNA
atatatatttttgatttttaaaatttattttttttatttttagtgattgattattattatttttgatgttagaaatttaggtgttgtttagtattttttttagtttttatttaaagttat

SEQ ID NO: 5483 - DNA, 120 bp, synthetic construct
  source 1..120: mol_type = other DNA
tacctctaactcctaaaatccactcttcctatcttcaataattaaccactactatcccacctaatacttaataccaaaaacctaaatattatccaatattcttcccaatctccattcaaa

SEQ ID NO: 5484 - DNA, 120 bp, synthetic construct
  source 1..120: mol_type = other DNA
tatttttgatttttaaaatttattttttttatttttagtgattgattattattattttatttggtgtttgatgttagaaatttaggtgttgtttagtattttttttagtttttatttaaa

SEQ ID NO: 5485 - DNA, 120 bp, synthetic construct; identical to SEQ ID NO: 5481
  source 1..120: mol_type = other DNA

SEQ ID NO: 5486 - DNA, 120 bp, synthetic construct; identical to SEQ ID NO: 5482
  source 1..120: mol_type = other DNA

SEQ ID NO: 5487 - DNA, 120 bp, synthetic construct; identical to SEQ ID NO: 5483
  source 1..120: mol_type = other DNA

SEQ ID NO: 5488 - DNA, 120 bp, synthetic construct; identical to SEQ ID NO: 5484
  source 1..120: mol_type = other DNA

SEQ ID NO: 5489 - DNA, 120 bp, synthetic construct
  source 1..120: mol_type = other DNA
atcaacacctaaatactcaaccattcacctaacataatcaaacctaatacactaaaccctaaaaacttcttcacatatatttaatatttatcttaaatcatctctattccacttactttc

SEQ ID NO: 5490 - DNA, 120 bp, synthetic construct
  source 1..120: mol_type = other DNA
attaatatttagatatttaattatttatttaatatgattagatttagtgtattgaattttaaagatttttttatatatatttggtatttattttagattatttttattttatttattttt

SEQ ID NO: 5491 - DNA, 120 bp, synthetic construct
  source 1..120: mol_type = other DNA
ctaatcaacacctaaatactcaaccattcacctaacataatcaaacctaatacactaaacccttcttcacatatatttaatatttatcttaaatcatctctattccacttactttctccc

SEQ ID NO: 5492 - DNA, 120 bp, synthetic construct
  source 1..120: mol_type = other DNA
ttaattaatatttagatatttaattatttatttaatatgattagatttagtgtattgaatttttttttatatatatttggtatttattttagattatttttattttatttattttttttt

SEQ ID NO: 5493 - DNA, 120 bp, synthetic construct; identical to SEQ ID NO: 5489
  source 1..120: mol_type = other DNA

SEQ ID NO: 5494 - DNA, 120 bp, synthetic construct; identical to SEQ ID NO: 5490
  source 1..120: mol_type = other DNA

SEQ ID NO: 5495 - DNA, 120 bp, synthetic construct; identical to SEQ ID NO: 5491
  source 1..120: mol_type = other DNA

SEQ ID NO: 5496 - DNA, 120 bp, synthetic construct; identical to SEQ ID NO: 5492
  source 1..120: mol_type = other DNA

SEQ ID NO: 5497 - DNA, 120 bp, synthetic construct
  source 1..120: mol_type = other DNA
ctcacataaatattcaataaataatctctttttttcccttaaaaaactaaaatctatacctaatttatctttatatccctacaaaacacaatacctaataacacattcactaactattaa

SEQ ID NO: 5498 - DNA, 120 bp, synthetic construct
  source 1..120: mol_type = other DNA
tttatataaatgtttagtaaatggttttttttttttttttaagaggttaggatttgtatttaatttatttttatatttttgtagggtataatatttggtaatatatttattagttgttag

SEQ ID NO: 5499 - DNA, 120 bp, synthetic construct
  source 1..120: mol_type = other DNA
tatctcacataaatattcaataaataatctctttttttcccttaaaaaactaaaatctatatatctttatatccctacaaaacacaatacctaataacacattcactaactattaattaa

SEQ ID NO: 5500 - DNA, 120 bp, synthetic construct
  source 1..120: mol_type = other DNA
tgttttatataaatgtttagtaaatggttttttttttttttttaagaggttaggatttgtatatttttatatttttgtagggtataatatttggtaatatatttattagttgttagttga

SEQ ID NO: 5501 - DNA, 120 bp, synthetic construct; identical to SEQ ID NO: 5497
  source 1..120: mol_type = other DNA

SEQ ID NO: 5502 - DNA, 120 bp, synthetic construct; identical to SEQ ID NO: 5498
  source 1..120: mol_type = other DNA

SEQ ID NO: 5503 - DNA, 120 bp, synthetic construct; identical to SEQ ID NO: 5499
  source 1..120: mol_type = other DNA

SEQ ID NO: 5504 - DNA, 120 bp, synthetic construct; identical to SEQ ID NO: 5500
  source 1..120: mol_type = other DNA

SEQ ID NO: 5505 - DNA, 120 bp, synthetic construct
  source 1..120: mol_type = other DNA
ttttaaaactatcctttcattaccttttactaacttattacaacataatcaaaaaaacacaatctatacaatattatttatttaaaatttattaaaacttatattaaaacccaatttaac

SEQ ID NO: 5506 - DNA, 120 bp, synthetic construct
  source 1..120: mol_type = other DNA
ttttaaagttgtttttttattattttttgttaatttattgtaatatggttagagaaatatagtttgtataatattgtttgtttagaatttattggggtttatattaagatttaatttgat

SEQ ID NO: 5507 - DNA, 120 bp, synthetic construct
  source 1..120: mol_type = other DNA
aattattttaaaactatcctttcattaccttttactaacttattacaacataatcaaaaaatacaatattatttatttaaaatttattaaaacttatattaaaacccaatttaacttacc

SEQ ID NO: 5508 - DNA, 120 bp, synthetic construct
  source 1..120: mol_type = other DNA
ggttattttaaagttgtttttttattattttttgttaatttattgtaatatggttagagaatataatattgtttgtttagaatttattggggtttatattaagatttaatttgatttgtt

SEQ ID NO: 5509 - DNA, 120 bp, synthetic construct; identical to SEQ ID NO: 5505
  source 1..120: mol_type = other DNA

SEQ ID NO: 5510 - DNA, 120 bp, synthetic construct; identical to SEQ ID NO: 5506
  source 1..120: mol_type = other DNA

SEQ ID NO: 5511 - DNA, 120 bp, synthetic construct; identical to SEQ ID NO: 5507
  source 1..120: mol_type = other DNA

SEQ ID NO: 5512 - DNA, 120 bp, synthetic construct; identical to SEQ ID NO: 5508
  source 1..120: mol_type = other DNA

SEQ ID NO: 5513 - DNA, 120 bp, synthetic construct
  source 1..120: mol_type = other DNA
catcaaaaataaatacaaatataaaatcttatatcctaacccccaacacttttatctcacataaaacaccctaaaaataccccctaaaaaaataaaaaacctaaaaccataaacccaacc

SEQ ID NO: 5514 - DNA, 120 bp, synthetic construct
  source 1..120: mol_type = other DNA
tgttaagggtgggtgtagatgtgggattttgtgttttggtttttagtatttttattttatgtgaaatattttaaggatgttttttgaaagggtgggaggtttgagattatgggtttagtt

SEQ ID NO: 5515 - DNA, 120 bp, synthetic construct
  source 1..120: mol_type = other DNA
atcccatcaaaaataaatacaaatataaaatcttatatcctaacccccaacacttttatctcaccctaaaaataccccctaaaaaaataaaaaacctaaaaccataaacccaaccaacct

SEQ ID NO: 5516 - DNA, 120 bp, synthetic construct
  source 1..120: mol_type = other DNA
gttttgttaagggtgggtgtagatgtgggattttgtgttttggtttttagtatttttattttattttaaggatgttttttgaaagggtgggaggtttgagattatgggtttagttaattt

SEQ ID NO: 5517 - DNA, 120 bp, synthetic construct
  source 1..120: mol_type = other DNA
cgtcaaaaataaatacaaatataaaatcttatatcctaacccccaacacttttatctcacgtaaaacaccctaaaaataccccctaaaaaaataaaaaacctaaaaccataaacccaacc

SEQ ID NO: 5518 - DNA, 120 bp, synthetic construct
  source 1..120: mol_type = other DNA
cgttaagggtgggtgtagatgtgggattttgtgttttggtttttagtatttttattttacgtgaaatattttaaggatgttttttgaaagggtgggaggtttgagattatgggtttagtt

SEQ ID NO: 5519 - DNA, 120 bp, synthetic construct
  source 1..120: mol_type = other DNA
atcccgtcaaaaataaatacaaatataaaatcttatatcctaacccccaacacttttatctcaccctaaaaataccccctaaaaaaataaaaaacctaaaaccataaacccaaccaacct

SEQ ID NO: 5520 - DNA, 120 bp, synthetic construct
  source 1..120: mol_type = other DNA
gtttcgttaagggtgggtgtagatgtgggattttgtgttttggtttttagtatttttattttattttaaggatgttttttgaaagggtgggaggtttgagattatgggtttagttaattt

SEQ ID NO: 5521 - DNA, 120 bp, synthetic construct
  source 1..120: mol_type = other DNA
ccaaaaaacaaaaccttaaactaaaataaataccaaaacctcatttaaaaaccataacaaccaacccactaattctcaaaacacaaatatcatttacttcttaatacctaaaataaaaat

SEQ ID NO: 5522 - DNA, 120 bp, synthetic construct
  source 1..120: mol_type = other DNA
ttaaggaatagagttttaggttaaaatagatgttagggttttatttaaaaattatgatagttagtttattaatttttagaatataagtattatttattttttggtgtttggagtgagagt

SEQ ID NO: 5523 - DNA, 120 bp, synthetic construct
  source 1..120: mol_type = other DNA
atcaccaaaaaacaaaaccttaaactaaaataaataccaaaacctcatttaaaaaccataacactaattctcaaaacacaaatatcatttacttcttaatacctaaaataaaaatttatc

SEQ ID NO: 5524 - DNA, 120 bp, synthetic construct
  source 1..120: mol_type = other DNA
gttattaaggaatagagttttaggttaaaatagatgttagggttttatttaaaaattatgatattaatttttagaatataagtattatttattttttggtgtttggagtgagagtttgtt

SEQ ID NO: 5525 - DNA, 120 bp, synthetic construct; identical to SEQ ID NO: 5521
  source 1..120: mol_type = other DNA

SEQ ID NO: 5526 - DNA, 120 bp, synthetic construct; identical to SEQ ID NO: 5522
  source 1..120: mol_type = other DNA

SEQ ID NO: 5527 - DNA, 120 bp, synthetic construct; identical to SEQ ID NO: 5523
  source 1..120: mol_type = other DNA

SEQ ID NO: 5528 - DNA, 120 bp, synthetic construct
  source 1..120: mol_type = other DNA
gttattaaggaatagagttttaggttaaaatagatgttagggttttatttaaaaattatgatattaatttttagaatataagtattatttattttttggtgtttggagtgagagtttgtc

SEQ ID NO: 5529 - DNA, 120 bp, synthetic construct
  source 1..120: mol_type = other DNA
attccttttccttcttttcttactaaaacttaatattcaacttcattttcctaactataacctcaacaacaattaattctaaaacactcattcccatctaaaactctactttcttactct

SEQ ID NO: 5530 - DNA, 120 bp, synthetic construct
  source 1..120: mol_type = other DNA
attttttttttttttttttttgttgggatttgatgtttagttttatttttttgattgtgattttaataataattgattttagaatatttatttttatttgaaattttatttttttatttt

SEQ ID NO: 5531 - DNA, 120 bp, synthetic construct
  source 1..120: mol_type = other DNA
ttttccttcttttcttactaaaacttaatattcaacttcattttcctaactataacctcaacacttctcaacaacaattaattctaaaacactcattcccatctaaaactctactttctt

SEQ ID NO: 5532 - DNA, 120 bp, synthetic construct
  source 1..120: mol_type = other DNA
ttttttttttttttttgttgggatttgatgtttagttttatttttttgattgtgattttagtattttttaataataattgattttagaatatttatttttatttgaaattttattttttt

SEQ ID NO: 5533 - DNA, 120 bp, synthetic construct; identical to SEQ ID NO: 5529
  source 1..120: mol_type = other DNA

SEQ ID NO: 5534 - DNA, 120 bp, synthetic construct; identical to SEQ ID NO: 5530
  source 1..120: mol_type = other DNA

SEQ ID NO: 5535 - DNA, 120 bp, synthetic construct; identical to SEQ ID NO: 5531
  source 1..120: mol_type = other DNA

SEQ ID NO: 5536 - DNA, 120 bp, synthetic construct; identical to SEQ ID NO: 5532
  source 1..120: mol_type = other DNA

SEQ ID NO: 5537 - DNA, 120 bp, synthetic construct
  source 1..120: mol_type = other DNA
catttcaaatatttcatctcttttctatcaccttaaaaaaaccaaaatcttaaacccaaatatataaaaatcaaaaaatcactaaaaatatataaaaaatacctcacacaaaataaaaca

SEQ ID NO: 5538 - DNA, 120 bp, synthetic construct
  source 1..120: mol_type = other DNA
tattttaaatgttttattttttttttattattttgaaaaagttagagttttaaatttaaatatgtaaggattagggagttattagaaatgtgtaaagaatattttgtataagataagata

SEQ ID NO: 5539 - DNA, 120 bp, synthetic construct
  source 1..120: mol_type = other DNA
aatacatttcaaatatttcatctcttttctatcaccttaaaaaaaccaaaatcttaaacccaaaaatcaaaaaatcactaaaaatatataaaaaatacctcacacaaaataaaacactaa

SEQ ID NO: 5540 - DNA, 120 bp, synthetic construct
  source 1..120: mol_type = other DNA
gatgtattttaaatgttttattttttttttattattttgaaaaagttagagttttaaatttaaggattagggagttattagaaatgtgtaaagaatattttgtataagataagatattaa

SEQ ID NO: 5541 - DNA, 120 bp, synthetic construct
  source 1..120: mol_type = other DNA
catttcaaatatttcatctcttttctatcaccttaaaaaaaccaaaatcttaaacccaaatatataaaaatcaaaaaatcactaaaaatatataaaaaatacctcgcacaaaataaaaca

SEQ ID NO: 5542 - DNA, 120 bp, synthetic construct
  source 1..120: mol_type = other DNA
tattttaaatgttttattttttttttattattttgaaaaagttagagttttaaatttaaatatgtaaggattagggagttattagaaatgtgtaaagaatatttcgtataagataagata

SEQ ID NO: 5543 - DNA, 120 bp, synthetic construct
  source 1..120: mol_type = other DNA
aatacatttcaaatatttcatctcttttctatcaccttaaaaaaaccaaaatcttaaacccaaaaatcaaaaaatcactaaaaatatataaaaaatacctcgcacaaaataaaacactaa

SEQ ID NO: 5544 - DNA, 120 bp, synthetic construct
  source 1..120: mol_type = other DNA
gatgtattttaaatgttttattttttttttattattttgaaaaagttagagttttaaatttaaggattagggagttattagaaatgtgtaaagaatatttcgtataagataagatattaa

SEQ ID NO: 5545 - DNA, 120 bp, synthetic construct
  source 1..120: mol_type = other DNA
aaaataaaaaataaaaacaaatataaacaaaacaaacaacaacaacaacaaaaaacttaaaaaaatataaatccttatttctataatcatataatattctacaatctacataccaatcta

SEQ ID NO: 5546 - DNA, 120 bp, synthetic construct
  source 1..120: mol_type = other DNA
aaaataagaaataaaaataagtataaataaaataaataataataataataaaaaatttaaaaaaatgtgaatttttatttttgtagttatataatattttgtaatttgtatgttagtttg

SEQ ID NO: 5547 - DNA, 120 bp, synthetic construct
  source 1..120: mol_type = other DNA
aaaaaaaaataaaaaataaaaacaaatataaacaaaacaaacaacaacaacaacaaaaaacataaatccttatttctataatcatataatattctacaatctacataccaatctaacact

SEQ ID NO: 5548 - DNA, 120 bp, synthetic construct
  source 1..120: mol_type = other DNA
aaagaaaaataagaaataaaaataagtataaataaaataaataataataataataaaaaatgtgaatttttatttttgtagttatataatattttgtaatttgtatgttagtttggtatt

SEQ ID NO: 5549 - DNA, 120 bp, synthetic construct; identical to SEQ ID NO: 5545
  source 1..120: mol_type = other DNA

SEQ ID NO: 5550 - DNA, 120 bp, synthetic construct; identical to SEQ ID NO: 5546
  source 1..120: mol_type = other DNA

SEQ ID NO: 5551 - DNA, 120 bp, synthetic construct
  source 1..120: mol_type = other DNA
aaaaaaaaataaaaaataaaaacaaatataaacaaaacaaacaacaacaacaacaaaaaacgtaaatccttatttctataatcatataatattctacaatctacataccaatctaacact

SEQ ID NO: 5552 - DNA, 120 bp, synthetic construct
  source 1..120: mol_type = other DNA
aaagaaaaataagaaataaaaataagtataaataaaataaataataataataataaaaaacgtgaatttttatttttgtagttatataatattttgtaatttgtatgttagtttggtatt

SEQ ID NO: 5553 - DNA, 120 bp, synthetic construct
  source 1..120: mol_type = other DNA
attcatttttaccactaataaatcaaatattaaaataataactactatataaaaattacaacttaaacaacatttctaaaaaatttttttattttacatttaaatccatatttaccttat

SEQ ID NO: 5554 - DNA, 120 bp, synthetic construct
  source 1..120: mol_type = other DNA
atttatttttattattgatagattaagtattgagatagtgattgttgtgtgaaaattataatttgaataatatttttgaaaaatttttttattttgtatttaaatttatgtttgttttat

SEQ ID NO: 5555 - DNA, 120 bp, synthetic construct
  source 1..120: mol_type = other DNA
ctttattcatttttaccactaataaatcaaatattaaaataataactactatataaaaattacaacatttctaaaaaatttttttattttacatttaaatccatatttaccttattaaaa

SEQ ID NO: 5556 - DNA, 120 bp, synthetic construct
  source 1..120: mol_type = other DNA
ttttatttatttttattattgatagattaagtattgagatagtgattgttgtgtgaaaattataatatttttgaaaaatttttttattttgtatttaaatttatgtttgttttattgaag

SEQ ID NO: 5557 - DNA, 120 bp, synthetic construct; identical to SEQ ID NO: 5553
  source 1..120: mol_type = other DNA

SEQ ID NO: 5558 - DNA, 120 bp, synthetic construct; identical to SEQ ID NO: 5554
  source 1..120: mol_type = other DNA

SEQ ID NO: 5559 - DNA, 120 bp, synthetic construct; identical to SEQ ID NO: 5555
  source 1..120: mol_type = other DNA

SEQ ID NO: 5560 - DNA, 120 bp, synthetic construct; identical to SEQ ID NO: 5556
  source 1..120: mol_type = other DNA

SEQ ID NO: 5561 - DNA, 120 bp, synthetic construct
  source 1..120: mol_type = other DNA
ctttcccaaacctacatccttctttaatcttttatccttctataacataattaacctttacaattaataaaactaaatatacattaaatcaataataacaatattaatatatttaattta

SEQ ID NO: 5562 - DNA, 120 bp, synthetic construct
  source 1..120: mol_type = other DNA
tttttttaagtttgtatttttttttggttttttatttttttgtaatatagttaatttttatggttagtaaggttgagtgtgtattaagttagtggtagtaatattaatatatttaatttg

SEQ ID NO: 5563 - DNA, 120 bp, synthetic construct
  source 1..120: mol_type = other DNA
attacctttcccaaacctacatccttctttaatcttttatccttctataacataattaaccataaaactaaatatacattaaatcaataataacaatattaatatatttaatttaaatca

SEQ ID NO: 5564 - DNA, 120 bp, synthetic construct
  source 1..120: mol_type = other DNA
gttgttttttttaagtttgtatttttttttggttttttatttttttgtaatatagttaattgtaaggttgagtgtgtattaagttagtggtagtaatattaatatatttaatttgaatta

SEQ ID NO: 5565 - DNA, 120 bp, synthetic construct
  source 1..120: mol_type = other DNA
ctttcccaaacctacatccttctttaatcttttatccttctataacataattaacctttacgattaataaaactaaatatacattaaatcaataataacaatattaatatatttaattta

SEQ ID NO: 5566 - DNA, 120 bp, synthetic construct
  source 1..120: mol_type = other DNA
tttttttaagtttgtatttttttttggttttttatttttttgtaatatagttaatttttacggttagtaaggttgagtgtgtattaagttagtggtagtaatattaatatatttaatttg

SEQ ID NO: 5567 - DNA, 120 bp, synthetic construct
  source 1..120: mol_type = other DNA
attacctttcccaaacctacatccttctttaatcttttatccttctataacataattaaccgtaaaactaaatatacattaaatcaataataacaatattaatatatttaatttaaatca

SEQ ID NO: 5568 - DNA, 120 bp, synthetic construct
  source 1..120: mol_type = other DNA
gttgttttttttaagtttgtatttttttttggttttttatttttttgtaatatagttaatcgtaaggttgagtgtgtattaagttagtggtagtaatattaatatatttaatttgaatta

SEQ ID NO: 5569 - DNA, 120 bp, synthetic construct
  source 1..120: mol_type = other DNA
ctaactacctttctataaaaataatattaaatattatctctatcttatattatctcattataattttataatcttaatattaatctacttaaaaatacacccaattttaataataaaaat

SEQ ID NO: 5570 - DNA, 120 bp, synthetic construct
  source 1..120: mol_type = other DNA
ttagttgtttttttataaaaataatgttaaatattatttttattttgtgttattttattgtaattttgtaattttagtattagtttgtttaaaaatatatttagttttggtaataaagat

SEQ ID NO: 5571 - DNA, 120 bp, synthetic construct
  source 1..120: mol_type = other DNA
actacctttctataaaaataatattaaatattatctctatcttatattatctcattatcaaaaaaattttataatcttaatattaatctacttaaaaatacacccaattttaataataaa

SEQ ID NO: 5572 - DNA, 120 bp, synthetic construct
  source 1..120: mol_type = other DNA
gttgtttttttataaaaataatgttaaatattatttttattttgtgttattttattgttagaggaattttgtaattttagtattagtttgtttaaaaatatatttagttttggtaataaa

SEQ ID NO: 5573 - DNA, 120 bp, synthetic construct; identical to SEQ ID NO: 5569
  source 1..120: mol_type = other DNA

SEQ ID NO: 5574 - DNA, 120 bp, synthetic construct; identical to SEQ ID NO: 5570
  source 1..120: mol_type = other DNA

SEQ ID NO: 5575 - DNA, 120 bp, synthetic construct; identical to SEQ ID NO: 5571
  source 1..120: mol_type = other DNA

SEQ ID NO: 5576 - DNA, 120 bp, synthetic construct; identical to SEQ ID NO: 5572
  source 1..120: mol_type = other DNA

SEQ ID NO: 5577 - DNA, 120 bp, synthetic construct
  source 1..120: mol_type = other DNA
aaataactataacttctctttatactcaaaaatcttaacaatatataaattaaataatcaccttttctatttctaattttaattaatcttctattaaatttaaccaactcttaacccctc

SEQ ID NO: 5578 - DNA, 120 bp, synthetic construct
  source 1..120: mol_type = other DNA
agatggttataatttttttttatgtttaaagattttgatagtatgtaaattgggtgattattttttttatttttagttttggttgattttttgttaggtttgattaatttttggtttttt

SEQ ID NO: 5579 - DNA, 120 bp, synthetic construct
  source 1..120: mol_type = other DNA
taccaaataactataacttctctttatactcaaaaatcttaacaatatataaattaaataatctatttctaattttaattaatcttctattaaatttaaccaactcttaacccctcttat

SEQ ID NO: 5580 - DNA, 120 bp, synthetic construct
  source 1..120: mol_type = other DNA
tgttagatggttataatttttttttatgtttaaagattttgatagtatgtaaattgggtgatttatttttagttttggttgattttttgttaggtttgattaatttttggttttttttat

SEQ ID NO: 5581 - DNA, 120 bp, synthetic construct; identical to SEQ ID NO: 5577
  source 1..120: mol_type = other DNA

SEQ ID NO: 5582 - DNA, 120 bp, synthetic construct; identical to SEQ ID NO: 5578
  source 1..120: mol_type = other DNA

SEQ ID NO: 5583 - DNA, 120 bp, synthetic construct; identical to SEQ ID NO: 5579
  source 1..120: mol_type = other DNA

SEQ ID NO: 5584 - DNA, 120 bp, synthetic construct; identical to SEQ ID NO: 5580
  source 1..120: mol_type = other DNA

SEQ ID NO: 5585 - DNA, 120 bp, synthetic construct
  source 1..120: mol_type = other DNA
aataattcaaactaaatctaaaataaaaaattatttaaatccttaaaaaacaacaataaaaaaaactattatttaaaaattacaaacattttctttctcttaaaacataaaaaattaaac

SEQ ID NO: 5586 - DNA, 120 bp, synthetic construct
  source 1..120: mol_type = other DNA
aataatttaagttaagtttgaaataaaagattatttaaatttttgaaaggtaataatggggaaaattgttgtttaaaaattgtaagtgtttttttttttttaaaatgtgagggattaaat

SEQ ID NO: 5587 - DNA, 120 bp, synthetic construct
  source 1..120: mol_type = other DNA
ttttaaataattcaaactaaatctaaaataaaaaattatttaaatccttaaaaaacaacaatattatttaaaaattacaaacattttctttctcttaaaacataaaaaattaaactttca

SEQ ID NO: 5588 - DNA, 120 bp, synthetic construct
  source 1..120: mol_type = other DNA
ttttaaataatttaagttaagtttgaaataaaagattatttaaatttttgaaaggtaataatgttgtttaaaaattgtaagtgtttttttttttttaaaatgtgagggattaaattttta

SEQ ID NO: 5589 - DNA, 120 bp, synthetic construct
  source 1..120: mol_type = other DNA
aataattcaaactaaatctaaaataaaaaattatttaaatccttaaaaaacaacaataaaaaaaactattatttaaaaattacaaacgttttctttctcttaaaacgtaaaaaattaaac

SEQ ID NO: 5590 - DNA, 120 bp, synthetic construct
  source 1..120: mol_type = other DNA
aataatttaagttaagtttgaaataaaagattatttaaatttttgaaaggtaataatggggaaaattgttgtttaaaaattgtaagcgtttttttttttttaaaacgtgagggattaaat

SEQ ID NO: 5591 - DNA, 120 bp, synthetic construct
  source 1..120: mol_type = other DNA
ttttaaataattcaaactaaatctaaaataaaaaattatttaaatccttaaaaaacaacaatattatttaaaaattacaaacgttttctttctcttaaaacgtaaaaaattaaactttca

SEQ ID NO: 5592 - DNA, 120 bp, synthetic construct
  source 1..120: mol_type = other DNA
ttttaaataatttaagttaagtttgaaataaaagattatttaaatttttgaaaggtaataatgttgtttaaaaattgtaagcgtttttttttttttaaaacgtgagggattaaattttta

SEQ ID NO: 5593 - DNA, 120 bp, synthetic construct
  source 1..120: mol_type = other DNA
tcaaatacaaaacactttatacaattaaaaataatacaactaaaatctactcccaaaacccttactcttctttactaacatttatttatattactaaatcccaattaaatctcctaaacc

SEQ ID NO: 5594 - DNA, 120 bp, synthetic construct
  source 1..120: mol_type = other DNA
ttaaatgtaaagtattttatataattggaaatagtatagttagaatttatttttagagtttttatttttttttattgatatttatttatgttgttaaattttagttaggttttttaaatt

SEQ ID NO: 5595 - DNA, 120 bp, synthetic construct
  source 1..120: mol_type = other DNA
tacaaaacactttatacaattaaaaataatacaactaaaatctactcccaaaacccttactataaattactcttctttactaacatttatttatattactaaatcccaattaaatctcct

SEQ ID NO: 5596 - DNA, 120 bp, synthetic construct
  source 1..120: mol_type = other DNA
tgtaaagtattttatataattggaaatagtatagttagaatttatttttagagtttttattatgaattatttttttttattgatatttatttatgttgttaaattttagttaggtttttt

SEQ ID NO: 5597 - DNA, 120 bp, synthetic construct; identical to SEQ ID NO: 5593
  source 1..120: mol_type = other DNA

SEQ ID NO: 5598 - DNA, 120 bp, synthetic construct; identical to SEQ ID NO: 5594
  source 1..120: mol_type = other DNA

SEQ ID NO: 5599 - DNA, 120 bp, synthetic construct; identical to SEQ ID NO: 5595
  source 1..120: mol_type = other DNA

SEQ ID NO: 5600 - DNA, 120 bp, synthetic construct; identical to SEQ ID NO: 5596
  source 1..120: mol_type = other DNA

SEQ ID NO: 5601 - DNA, 120 bp, synthetic construct
  source 1..120: mol_type = other DNA
aacaaaataaacctataaaataaaacctaaaaaaaaataccaacctaaaacattaaaaaaataaacaaaacaaacccaaaatctaaaaaacctaaaatattctaaaaaatatttatattt

SEQ ID NO: 5602 - DNA, 120 bp, synthetic construct
  source 1..120: mol_type = other DNA
agtaggatgggtttgtgggatggagtttggaagaagatgttagtttggggtattggagaagtgagtagggtagatttagagtttgaagagtttggaatgttttagaaggtatttatgttt

SEQ ID NO: 5603 - DNA, 120 bp, synthetic construct
  source 1..120: mol_type = other DNA
aatacaacaaaataaacctataaaataaaacctaaaaaaaaataccaacctaaaacattaaaaaacaaacccaaaatctaaaaaacctaaaatattctaaaaaatatttatattttatat

SEQ ID NO: 5604 - DNA, 120 bp, synthetic construct
  source 1..120: mol_type = other DNA
ggtgtagtaggatgggtttgtgggatggagtttggaagaagatgttagtttggggtattggagggtagatttagagtttgaagagtttggaatgttttagaaggtatttatgttttatat

SEQ ID NO: 5605 - DNA, 120 bp, synthetic construct; identical to SEQ ID NO: 5601
  source 1..120: mol_type = other DNA

SEQ ID NO: 5606 - DNA, 120 bp, synthetic construct; identical to SEQ ID NO: 5602
  source 1..120: mol_type = other DNA

SEQ ID NO: 5607 - DNA, 120 bp, synthetic construct; identical to SEQ ID NO: 5603
  source 1..120: mol_type = other DNA

SEQ ID NO: 5608 - DNA, 120 bp, synthetic construct; identical to SEQ ID NO: 5604
  source 1..120: mol_type = other DNA

SEQ ID NO: 5609 - DNA, 120 bp, synthetic construct
  source 1..120: mol_type = other DNA
tacattacattttaatattccatttaataaaataaaaaattcccataaaacacaccaaaatactatcacatatcaaaaaaaaaaacatacaaaaaaaataaacctatttttacctaaaat

SEQ ID NO: 5610 - DNA, 120 bp, synthetic construct
  source 1..120: mol_type = other DNA
tatattgtgttttagtgttttgtttggtgaaatgggaagtttttataaagtatattaaagtgttattatatattaaggaaagggatgtgtagggaaaatgagtttgtttttatttggaat

SEQ ID NO: 5611 - DNA, 120 bp, synthetic construct
  source 1..120: mol_type = other DNA
ttacattttaatattccatttaataaaataaaaaattcccataaaacacaccaaaatattaataactatcacatatcaaaaaaaaaaacatacaaaaaaaataaacctatttttacctaa

SEQ ID NO: 5612 - DNA, 120 bp, synthetic construct
  source 1..120: mol_type = other DNA
ttgtgttttagtgttttgtttggtgaaatgggaagtttttataaagtatattaaagtattggtggttattatatattaaggaaagggatgtgtagggaaaatgagtttgtttttatttgg

SEQ ID NO: 5613 - DNA, 120 bp, synthetic construct
  source 1..120: mol_type = other DNA
tacattacgttttaatattccgtttaataaaataaaaaattcccataaaacacaccaaaatactatcacatatcaaaaaaaaaaacgtacaaaaaaaataaacctatttttacctaaaat

SEQ ID NO: 5614 - DNA, 120 bp, synthetic construct
  source 1..120: mol_type = other DNA
tatattgcgttttagtgtttcgtttggtgaaatgggaagtttttataaagtatattaaagtgttattatatattaaggaaagggacgtgtagggaaaatgagtttgtttttatttggaat

SEQ ID NO: 5615 - DNA, 120 bp, synthetic construct
  source 1..120: mol_type = other DNA
ttacgttttaatattccgtttaataaaataaaaaattcccataaaacacaccaaaatattaataactatcacatatcaaaaaaaaaaacgtacaaaaaaaataaacctatttttacctaa

SEQ ID NO: 5616 - DNA, 120 bp, synthetic construct
  source 1..120: mol_type = other DNA
ttgcgttttagtgtttcgtttggtgaaatgggaagtttttataaagtatattaaagtattggtggttattatatattaaggaaagggacgtgtagggaaaatgagtttgtttttatttgg

SEQ ID NO: 5617 - DNA, 120 bp, synthetic construct
  source 1..120: mol_type = other DNA
aataatataccaatttatcttttaatctttttccccctttatcccaccataaactaaacattaaacaaaaaataaaaaactaatttaaatttaaccattaaactaaaaaaatatataatc

SEQ ID NO: 5618 - DNA, 120 bp, synthetic construct
  source 1..120: mol_type = other DNA
aataatatattaatttgttttttggtttttttttttttttattttattataaattgagtattagatagaaaataagaaattggtttgaatttaattattggattggaagagtgtgtgatt

SEQ ID NO: 5619 - DNA, 120 bp, synthetic construct
  source 1..120: mol_type = other DNA
atataccaatttatcttttaatctttttccccctttatcccaccataaactaaacattactactataaacaaaaaataaaaaactaatttaaatttaaccattaaactaaaaaaatatat

SEQ ID NO: 5620 - DNA, 120 bp, synthetic construct
  source 1..120: mol_type = other DNA
atatattaatttgttttttggtttttttttttttttattttattataaattgagtattgttattatagatagaaaataagaaattggtttgaatttaattattggattggaagagtgtgt

SEQ ID NO: 5621 - DNA, 120 bp, synthetic construct; identical to SEQ ID NO: 5617
  source 1..120: mol_type = other DNA

SEQ ID NO: 5622 - DNA, 120 bp, synthetic construct; identical to SEQ ID NO: 5618
  source 1..120: mol_type = other DNA

SEQ ID NO: 5623 - DNA, 120 bp, synthetic construct; identical to SEQ ID NO: 5619
  source 1..120: mol_type = other DNA

SEQ ID NO: 5624 - DNA, 120 bp, synthetic construct; identical to SEQ ID NO: 5620
  source 1..120: mol_type = other DNA

SEQ ID NO: 5625 - DNA, 120 bp, synthetic construct
  source 1..120: mol_type = other DNA
tatacaaaacacttcaaataacaacccacctccaaaataaatcccttaacaccaatcatccttcaataaactcaattattcaaaaaaacaaataaattttccaaatataaaatactatat

SEQ ID NO: 5626 - DNA, 120 bp, synthetic construct
  source 1..120: mol_type = other DNA
tgtgtaaaatattttagatggtaatttatttttaaagtgggttttttaatattagttgttttttaataagtttagttatttagaaaagtaagtgagttttttagatataagatattgtat

SEQ ID NO: 5627 - DNA, 120 bp, synthetic construct
  source 1..120: mol_type = other DNA
caaaacacttcaaataacaacccacctccaaaataaatcccttaacaccaatcatccttaaaatttcaataaactcaattattcaaaaaaacaaataaattttccaaatataaaatacta

SEQ ID NO: 5628 - DNA, 120 bp, synthetic construct
  source 1..120: mol_type = other DNA
taaaatattttagatggtaatttatttttaaagtgggttttttaatattagttgtttttggggttttaataagtttagttatttagaaaagtaagtgagttttttagatataagatattg

SEQ ID NO: 5629 - DNA, 120 bp, synthetic construct
  source 1..120: mol_type = other DNA
tatacaaaacacttcaaataacaacccacctccaaaataaatcccttaacaccaatcgtccttcaataaactcaattattcaaaaaaacaaataaattttccaaatataaaatactatat

SEQ ID NO: 5630 - DNA, 120 bp, synthetic construct
  source 1..120: mol_type = other DNA
tgtgtaaaatattttagatggtaatttatttttaaagtgggttttttaatattagtcgttttttaataagtttagttatttagaaaagtaagtgagttttttagatataagatattgtat

SEQ ID NO: 5631 - DNA, 120 bp, synthetic construct
  source 1..120: mol_type = other DNA
caaaacacttcaaataacaacccacctccaaaataaatcccttaacaccaatcgtccttaaaatttcaataaactcaattattcaaaaaaacaaataaattttccaaatataaaatacta

SEQ ID NO: 5632 - DNA, 120 bp, synthetic construct
  source 1..120: mol_type = other DNA
taaaatattttagatggtaatttatttttaaagtgggttttttaatattagtcgtttttggggttttaataagtttagttatttagaaaagtaagtgagttttttagatataagatattg

SEQ ID NO: 5633 - DNA, 120 bp, synthetic construct
  source 1..120: mol_type = other DNA
cttatataatcaccaatactaattttaaaataatatccaaaattcacaataaaattttatttccaaacaacaacataaacccccaacttaaaacaaatctcccctatcatcatattacaa

SEQ ID NO: 5634 - DNA, 120 bp, synthetic construct
  source 1..120: mol_type = other DNA
tttatgtaattattaatgttggttttgaggtgatgtttgaagtttataatgaaattttatttttaagtagtaatatgagtttttgatttgggataagttttttttattgttatgttgtag

SEQ ID NO: 5635 - DNA, 120 bp, synthetic construct
  source 1..120: mol_type = other DNA
ataatcaccaatactaattttaaaataatatccaaaattcacaataaaattttatttcaatcattatccaaacaacaacataaacccccaacttaaaacaaatctcccctatcatcatat

SEQ ID NO: 5636 - DNA, 120 bp, synthetic construct
  source 1..120: mol_type = other DNA
gtaattattaatgttggttttgaggtgatgtttgaagtttataatgaaattttattttgattattatttaagtagtaatatgagtttttgatttgggataagttttttttattgttatgt

SEQ ID NO: 5637 - DNA, 120 bp, synthetic construct
  source 1..120: mol_type = other DNA
cttatataatcaccaatactaattttaaaataatatccgaaattcacaataaaattttatttccaaacaacaacataaacccccgacttaaaacaaatctcccctatcgtcatattacaa

SEQ ID NO: 5638 - DNA, 120 bp, synthetic construct
  source 1..120: mol_type = other DNA
tttatgtaattattaatgttggttttgaggtgatgttcgaagtttataatgaaattttatttttaagtagtaatatgagttttcgatttgggataagttttttttatcgttatgttgtag

SEQ ID NO: 5639 - DNA, 120 bp, synthetic construct
  source 1..120: mol_type = other DNA
ataatcaccaatactaattttaaaataatatccgaaattcacaataaaattttatttcgatcattatccaaacaacaacataaacccccgacttaaaacaaatctcccctatcgtcatat

SEQ ID NO: 5640 - DNA, 120 bp, synthetic construct
  source 1..120: mol_type = other DNA
gtaattattaatgttggttttgaggtgatgttcgaagtttataatgaaattttatttcgattattatttaagtagtaatatgagttttcgatttgggataagttttttttatcgttatgt

SEQ ID NO: 5641 - DNA, 120 bp, synthetic construct
  source 1..120: mol_type = other DNA
ttaacccacaaaaatactttaaaaatctacttcaaaaaacactctacccaacataattaacaaccttacacatttccataactttaactaacaccaatatataataaaatccaaatcttt

SEQ ID NO: 5642 - DNA, 120 bp, synthetic construct
  source 1..120: mol_type = other DNA
ttaatttataaagatgttttgaaaatttattttaaaaagtattttgtttggtataattgataattttatatatttttatggttttaattaatattaatgtgtgatgaagtttaaattttt

SEQ ID NO: 5643 - DNA, 120 bp, synthetic construct
  source 1..120: mol_type = other DNA
cccacaaaaatactttaaaaatctacttcaaaaaacactctacccaacataattaacaatttaataaccttacacatttccataactttaactaacaccaatatataataaaatccaaat

SEQ ID NO: 5644 - DNA, 120 bp, synthetic construct
  source 1..120: mol_type = other DNA
tttataaagatgttttgaaaatttattttaaaaagtattttgtttggtataattgataatttgataattttatatatttttatggttttaattaatattaatgtgtgatgaagtttaaat

SEQ ID NO: 5645 - DNA, 120 bp, synthetic construct
  source 1..120: mol_type = other DNA
ttaacccacaaaaatactttaaaaatctacttcaaaaaacactctacccgacataattaacaaccttacacatttccataactttaactaacaccaatatataataaaatccaaatcttt

SEQ ID NO: 5646 - DNA, 120 bp, synthetic construct
  source 1..120: mol_type = other DNA
ttaatttataaagatgttttgaaaatttattttaaaaagtattttgttcggtataattgataattttatatatttttatggttttaattaatattaatgtgtgatgaagtttaaattttt

SEQ ID NO: 5647 - DNA, 120 bp, synthetic construct
  source 1..120: mol_type = other DNA
cccacaaaaatactttaaaaatctacttcaaaaaacactctacccgacataattaacaatttaataaccttacacatttccataactttaactaacaccaatatataataaaatccaaat

SEQ ID NO: 5648 - DNA, 120 bp, synthetic construct
  source 1..120: mol_type = other DNA
tttataaagatgttttgaaaatttattttaaaaagtattttgttcggtataattgataatttgataattttatatatttttatggttttaattaatattaatgtgtgatgaagtttaaat

SEQ ID NO: 5649 - DNA, 120 bp, synthetic construct
  source 1..120: mol_type = other DNA
atactatatatataaattatatcacttaatataaatacaattcttatcttctccattttataaattaaaattataaaaacaaaacaatttacactaaatcaactaactaataaaaaacaa

SEQ ID NO: 5650 - DNA, 120 bp, synthetic construct
  source 1..120: mol_type = other DNA
gtgttatatatatgaattatattatttgatgtaagtgtaatttttattttttttattttataaattgaagttataaaagtaaagtaatttatattgggttaattgattagtaagaagtaa

SEQ ID NO: 5651 - DNA, 120 bp, synthetic construct
  source 1..120: mol_type = other DNA
tatatatataaattatatcacttaatataaatacaattcttatcttctccattttataaattaaaaaattaaaattataaaaacaaaacaatttacactaaatcaactaactaataaaaa

SEQ ID NO: 5652 - DNA, 120 bp, synthetic construct
  source 1..120: mol_type = other DNA
tatatatatgaattatattatttgatgtaagtgtaatttttattttttttattttatagattaggaaattgaagttataaaagtaaagtaatttatattgggttaattgattagtaagaa

SEQ ID NO: 5653 - DNA, 120 bp, synthetic construct; identical to SEQ ID NO: 5649
  source 1..120: mol_type = other DNA

SEQ ID NO: 5654 - DNA, 120 bp, synthetic construct; identical to SEQ ID NO: 5650
  source 1..120: mol_type = other DNA

SEQ ID NO: 5655 - DNA, 120 bp, synthetic construct; identical to SEQ ID NO: 5651
  source 1..120: mol_type = other DNA

SEQ ID NO: 5656 - DNA, 120 bp, synthetic construct; identical to SEQ ID NO: 5652
  source 1..120: mol_type = other DNA

SEQ ID NO: 5657 - DNA, 120 bp, synthetic construct
  source 1..120: mol_type = other DNA
attaaatatacatctcaattccaattattacaccaaatacaaattaataatatccacaataacatattataataatactacaaattcataaaaccctctaattttccataaatctctaac

SEQ ID NO: 5658 - DNA, 120 bp, synthetic construct
  source 1..120: mol_type = other DNA
attaaatgtgtattttggttttaattattgtattagatataaattagtagtatttataatggtatattgtggtggtattataaatttataaagttttttggttttttatgagtttttagt

SEQ ID NO: 5659 - DNA, 120 bp, synthetic construct
  source 1..120: mol_type = other DNA
aatatacatctcaattccaattattacaccaaatacaaattaataatatccacaataactatttacatattataataatactacaaattcataaaaccctctaattttccataaatctct

SEQ ID NO: 5660 - DNA, 120 bp, synthetic construct
  source 1..120: mol_type = other DNA
aatgtgtattttggttttaattattgtattagatataaattagtagtatttataatggttatttgtatattgtggtggtattataaatttataaagttttttggttttttatgagttttt

SEQ ID NO: 5661 - DNA, 120 bp, synthetic construct
  source 1..120: mol_type = other DNA
attaaatatacatctcgattccaattattacaccaaatacaaattaataatatccacaataacatattataataatactacaaattcataaaaccctctaattttccataaatctctaac

SEQ ID NO: 5662 - DNA, 120 bp, synthetic construct
  source 1..120: mol_type = other DNA
attaaatgtgtatttcggttttaattattgtattagatataaattagtagtatttataatggtatattgtggtggtattataaatttataaagttttttggttttttatgagtttttagt

SEQ ID NO: 5663 - DNA, 120 bp, synthetic construct
  source 1..120: mol_type = other DNA
aatatacatctcgattccaattattacaccaaatacaaattaataatatccacaataactatttacatattataataatactacaaattcataaaaccctctaattttccataaatctct

SEQ ID NO: 5664 - DNA, 120 bp, synthetic construct
  source 1..120: mol_type = other DNA
aatgtgtatttcggttttaattattgtattagatataaattagtagtatttataatggttatttgtatattgtggtggtattataaatttataaagttttttggttttttatgagttttt

SEQ ID NO: 5665 - DNA, 120 bp, synthetic construct
  source 1..120: mol_type = other DNA
ctatactaaaaaccaacccatcaaacctcattccccaccaaaaatacccaaaaacaaacccaatacttccttaactccctccactcaccactatttactaaactttacccatcaaataac

SEQ ID NO: 5666 - DNA, 120 bp, synthetic construct
  source 1..120: mol_type = other DNA
ttatgttggggattagtttattaaattttattttttattaaaaatgtttgaaagtaaatttagtatttttttgattttttttatttattgttatttattgagttttgtttattaaataat

SEQ ID NO: 5667 - DNA, 120 bp, synthetic construct
  source 1..120: mol_type = other DNA
aatatctatactaaaaaccaacccatcaaacctcattccccaccaaaaatacccaaaaacattccttaactccctccactcaccactatttactaaactttacccatcaaataactccca

SEQ ID NO: 5668 - DNA, 120 bp, synthetic construct
  source 1..120: mol_type = other DNA
ggtatttatgttggggattagtttattaaattttattttttattaaaaatgtttgaaagtattttttgattttttttatttattgttatttattgagttttgtttattaaataatttttg

SEQ ID NO: 5669 - DNA, 120 bp, synthetic construct
  source 1..120: mol_type = other DNA
ctatactaaaaaccaacccatcaaacctcattccccaccaaaaatacccgaaaacaaacccaatacttccttaactccctccactcaccgctatttactaaactttacccatcaaataac

SEQ ID NO: 5670 - DNA, 120 bp, synthetic construct
  source 1..120: mol_type = other DNA
ttatgttggggattagtttattaaattttattttttattaaaaatgttcgaaagtaaatttagtatttttttgattttttttatttatcgttatttattgagttttgtttattaaataat

SEQ ID NO: 5671 - DNA, 120 bp, synthetic construct
  source 1..120: mol_type = other DNA
aatatctatactaaaaaccaacccatcaaacctcattccccaccaaaaatacccgaaaacattccttaactccctccactcaccgctatttactaaactttacccatcaaataactcccg

SEQ ID NO: 5672 - DNA, 120 bp, synthetic construct
  source 1..120: mol_type = other DNA
ggtatttatgttggggattagtttattaaattttattttttattaaaaatgttcgaaagtattttttgattttttttatttatcgttatttattgagttttgtttattaaataattttcg

SEQ ID NO: 5673 - DNA, 120 bp, synthetic construct
  source 1..120: mol_type = other DNA
acaaaccatatccttacattatattaactctaataatataaaaaaaaattaaaaataacttaatccttcaaatatcccaaaatctaataaaataaacatctcaacaaacaaaacataaca

SEQ ID NO: 5674 - DNA, 120 bp, synthetic construct
  source 1..120: mol_type = other DNA
ataaattatgtttttgtattgtgttagttttaatgatataaagaaaagttgaaaatggtttgattttttaagtattttaaaatttaatggagtagatattttagtaaataaaatatgata

SEQ ID NO: 5675 - DNA, 120 bp, synthetic construct
  source 1..120: mol_type = other DNA
taaacaaaccatatccttacattatattaactctaataatataaaaaaaaattaaaaataacttcaaatatcccaaaatctaataaaataaacatctcaacaaacaaaacataacaaatt

SEQ ID NO: 5676 - DNA, 120 bp, synthetic construct
  source 1..120: mol_type = other DNA
taaataaattatgtttttgtattgtgttagttttaatgatataaagaaaagttgaaaatggttttaagtattttaaaatttaatggagtagatattttagtaaataaaatatgataaatt

SEQ ID NO: 5677 - DNA, 120 bp, synthetic construct; identical to SEQ ID NO: 5673
  source 1..120: mol_type = other DNA

SEQ ID NO: 5678 - DNA, 120 bp, synthetic construct; identical to SEQ ID NO: 5674
  source 1..120: mol_type = other DNA

SEQ ID NO: 5679 - DNA, 120 bp, synthetic construct; identical to SEQ ID NO: 5675
  source 1..120: mol_type = other DNA

SEQ ID NO: 5680 - DNA, 120 bp, synthetic construct; identical to SEQ ID NO: 5676
  source 1..120: mol_type = other DNA

SEQ ID NO: 5681 - DNA, 120 bp, synthetic construct
  source 1..120: mol_type = other DNA
tcttccactaataatcaccttacacttatacctataaaccttaccataacttacaaaacactatataccccaacattcaatacccctcctaaaaaaaaaaataattcataacacttattc

SEQ ID NO: 5682 - DNA, 120 bp, synthetic construct
  source 1..120: mol_type = other DNA
ttttttattaataattattttgtatttgtgtttgtgggttttattatggtttataggatgttgtgtattttggtatttagtattttttttaaagaaaaaaataatttatgatatttgttt

SEQ ID NO: 5683 - DNA, 120 bp, synthetic construct
  source 1..120: mol_type = other DNA
taattcttccactaataatcaccttacacttatacctataaaccttaccataacttacaaaaccccaacattcaatacccctcctaaaaaaaaaaataattcataacacttattcaaaat

SEQ ID NO: 5684 - DNA, 120 bp, synthetic construct
  source 1..120: mol_type = other DNA
tgatttttttattaataattattttgtatttgtgtttgtgggttttattatggtttataggattttggtatttagtattttttttaaagaaaaaaataatttatgatatttgtttaagat

SEQ ID NO: 5685 - DNA, 120 bp, synthetic construct
  source 1..120: mol_type = other DNA
tcttccactaataatcaccttacacttatacctataaaccttaccataacttacaaaacgctatataccccgacattcaatacccctcctaaaaaaaaaaataattcataacacttattc

SEQ ID NO: 5686 - DNA, 120 bp, synthetic construct
  source 1..120: mol_type = other DNA
ttttttattaataattattttgtatttgtgtttgtgggttttattatggtttataggacgttgtgtatttcggtatttagtattttttttaaagaaaaaaataatttatgatatttgttt

SEQ ID NO: 5687 - DNA, 120 bp, synthetic construct
  source 1..120: mol_type = other DNA
taattcttccactaataatcaccttacacttatacctataaaccttaccataacttacaaaaccccgacattcaatacccctcctaaaaaaaaaaataattcataacacttattcaaaat

SEQ ID NO: 5688 - DNA, 120 bp, synthetic construct
  source 1..120: mol_type = other DNA
tgatttttttattaataattattttgtatttgtgtttgtgggttttattatggtttataggatttcggtatttagtattttttttaaagaaaaaaataatttatgatatttgtttaagat

SEQ ID NO: 5689 - DNA, 120 bp, synthetic construct
  source 1..120: mol_type = other DNA
cttttaaaatttaattactataaaatttaaaaaaaaaaaatccataaaatcatctatatatttcatctaaaaatcaccacatccaataatatacaacaacctatttacattcaaaatcta

SEQ ID NO: 5690 - DNA, 120 bp, synthetic construct
  source 1..120: mol_type = other DNA
tttttgggatttaattattgtaggatttaaagggaaagggtttatggggttatttatgtgttttatttggaaattattatgtttagtgatatgtagtaatttatttatatttagagtttg

SEQ ID NO: 5691 - DNA, 120 bp, synthetic construct
  source 1..120: mol_type = other DNA
atccttttaaaatttaattactataaaatttaaaaaaaaaaaatccataaaatcatctatatctaaaaatcaccacatccaataatatacaacaacctatttacattcaaaatctaccca

SEQ ID NO: 5692 - DNA, 120 bp, synthetic construct
  source 1..120: mol_type = other DNA
gtttttttgggatttaattattgtaggatttaaagggaaagggtttatggggttatttatgtttggaaattattatgtttagtgatatgtagtaatttatttatatttagagtttgttta

SEQ ID NO: 5693 - DNA, 120 bp, synthetic construct
  source 1..120: mol_type = other DNA
cttttaaaatttaattactataaaatttaaaaaaaaaaaatccataaaatcatctatatatttcatctaaaaatcaccacgtccaataatatacaacaacctatttacattcaaaatcta

SEQ ID NO: 5694 - DNA, 120 bp, synthetic construct
  source 1..120: mol_type = other DNA
tttttgggatttaattattgtaggatttaaagggaaagggtttatggggttatttatgtgttttatttggaaattattacgtttagtgatatgtagtaatttatttatatttagagtttg

SEQ ID NO: 5695 - DNA, 120 bp, synthetic construct
  source 1..120: mol_type = other DNA
atccttttaaaatttaattactataaaatttaaaaaaaaaaaatccataaaatcatctatatctaaaaatcaccacgtccaataatatacaacaacctatttacattcaaaatctaccca

SEQ ID NO: 5696 - DNA, 120 bp, synthetic construct
  source 1..120: mol_type = other DNA
gtttttttgggatttaattattgtaggatttaaagggaaagggtttatggggttatttatgtttggaaattattacgtttagtgatatgtagtaatttatttatatttagagtttgttta

SEQ ID NO: 5697 - DNA, 120 bp, synthetic construct
  source 1..120: mol_type = other DNA
taaaaaaatatataacaaataaatataccaaatcctaatttataataatacatctctataataaaatataaaaaaaaaaacaaaatatctaccatcttacatcataccttaaaataacaa

SEQ ID NO: 5698 - DNA, 120 bp, synthetic construct
  source 1..120: mol_type = other DNA
taagaaaatatgtaataaatggatatattaagttttgatttatagtaatgtatttttatgatagaatatggaaaaggaagtagaatatttattattttgtattatattttagaatggtag

SEQ ID NO: 5699 - DNA, 120 bp, synthetic construct
  source 1..120: mol_type = other DNA
acattaaaaaaatatataacaaataaatataccaaatcctaatttataataatacatctctatataaaaaaaaaaacaaaatatctaccatcttacatcataccttaaaataacaatttt

SEQ ID NO: 5700 - DNA, 120 bp, synthetic construct
  source 1..120: mol_type = other DNA
atattaagaaaatatgtaataaatggatatattaagttttgatttatagtaatgtatttttatatggaaaaggaagtagaatatttattattttgtattatattttagaatggtagtttt

SEQ ID NO: 5701 - DNA, 120 bp, synthetic construct; identical to SEQ ID NO: 5697
  source 1..120: mol_type = other DNA

SEQ ID NO: 5702 - DNA, 120 bp, synthetic construct; identical to SEQ ID NO: 5698
  source 1..120: mol_type = other DNA

SEQ ID NO: 5703 - DNA, 120 bp, synthetic construct; identical to SEQ ID NO: 5699
  source 1..120: mol_type = other DNA

SEQ ID NO: 5704 - DNA, 120 bp, synthetic construct; identical to SEQ ID NO: 5700
  source 1..120: mol_type = other DNA

SEQ ID NO: 5705 - DNA, 120 bp, synthetic construct
  source 1..120: mol_type = other DNA
tcaaattcatatattatacaaaaatacattccaaaatcaaaaatacaattactataatttaaaactttctacccctatacttcctactattcactaatataattatacatattttataat

SEQ ID NO: 5706 - DNA, 120 bp, synthetic construct
  source 1..120: mol_type = other DNA
ttaggtttatatgttatgtagaaatgtattttaaaattaaaaatatggttattgtgatttgggattttttatttttatattttttgttatttattaatataattatgtatgttttataat

SEQ ID NO: 5707 - DNA, 120 bp, synthetic construct
  source 1..120: mol_type = other DNA
atattcaaattcatatattatacaaaaatacattccaaaatcaaaaatacaattactataatttctacccctatacttcctactattcactaatataattatacatattttataattaaa

SEQ ID NO: 5708 - DNA, 120 bp, synthetic construct
  source 1..120: mol_type = other DNA
gtatttaggtttatatgttatgtagaaatgtattttaaaattaaaaatatggttattgtgatttttatttttatattttttgttatttattaatataattatgtatgttttataattaga

SEQ ID NO: 5709 - DNA, 120 bp, synthetic construct
  source 1..120: mol_type = other DNA
tcaaattcatatattatacaaaaatacattccaaaatcaaaaatacgattactataatttaaaactttctacccctatacttcctactattcactaatataattatacatattttataat

SEQ ID NO: 5710 - DNA, 120 bp, synthetic construct
  source 1..120: mol_type = other DNA
ttaggtttatatgttatgtagaaatgtattttaaaattaaaaatacggttattgtgatttgggattttttatttttatattttttgttatttattaatataattatgtatgttttataat

SEQ ID NO: 5711 - DNA, 120 bp, synthetic construct
  source 1..120: mol_type = other DNA
atattcaaattcatatattatacaaaaatacattccaaaatcaaaaatacgattactataatttctacccctatacttcctactattcactaatataattatacatattttataattaaa

SEQ ID NO: 5712 - DNA, 120 bp, synthetic construct
  source 1..120: mol_type = other DNA
gtatttaggtttatatgttatgtagaaatgtattttaaaattaaaaatacggttattgtgatttttatttttatattttttgttatttattaatataattatgtatgttttataattaga

SEQ ID NO: 5713 - DNA, 120 bp, synthetic construct
  source 1..120: mol_type = other DNA
tactaattaatacctaatattactaaatactctacaaaatattaaaaaaatcataataataaatctctaccttcccaaaaatttcaaattcataaaaaaaaccaacaaattaacaaaaaa

SEQ ID NO: 5714 - DNA, 120 bp, synthetic construct
  source 1..120: mol_type = other DNA
tattaattgatatttagtgttattggatattttgtaggatgttggggaaattatggtgatgagtttttgtttttttaggggttttagatttgtgagaggaattagtaagttaatagaaaa

SEQ ID NO: 5715 - DNA, 120 bp, synthetic construct
  source 1..120: mol_type = other DNA
aattaatacctaatattactaaatactctacaaaatattaaaaaaatcataataataaatactcaatctctaccttcccaaaaatttcaaattcataaaaaaaaccaacaaattaacaaa

SEQ ID NO: 5716 - DNA, 120 bp, synthetic construct
  source 1..120: mol_type = other DNA
aattgatatttagtgttattggatattttgtaggatgttggggaaattatggtgatgagtatttagtttttgtttttttaggggttttagatttgtgagaggaattagtaagttaataga

SEQ ID NO: 5717 - DNA, 120 bp, synthetic construct
  source 1..120: mol_type = other DNA
tactaattaatacctaatattactaaatactctacaaaatattaaaaaaatcataataataaatctctaccttcccaaaaatttcaaattcgtaaaaaaaaccaacaaattaacaaaaaa

SEQ ID NO: 5718 - DNA, 120 bp, synthetic construct
  source 1..120: mol_type = other DNA
tattaattgatatttagtgttattggatattttgtaggatgttggggaaattatggtgatgagtttttgtttttttaggggttttagattcgtgagaggaattagtaagttaatagaaaa

SEQ ID NO: 5719 - DNA, 120 bp, synthetic construct
  source 1..120: mol_type = other DNA
aattaatacctaatattactaaatactctacaaaatattaaaaaaatcataataataaatactcaatctctaccttcccaaaaatttcaaattcgtaaaaaaaaccaacaaattaacaaa

SEQ ID NO: 5720 - DNA, 120 bp, synthetic construct
  source 1..120: mol_type = other DNA
aattgatatttagtgttattggatattttgtaggatgttggggaaattatggtgatgagtatttagtttttgtttttttaggggttttagattcgtgagaggaattagtaagttaataga

SEQ ID NO: 5721 - DNA, 120 bp, synthetic construct
  source 1..120: mol_type = other DNA
aataaataaaaaacaaaatatattaaaacaattataaactaattaattaatttcataataaacacaaataaaaatcccttctaattattactatctttcttattaaaataaacacaactt

SEQ ID NO: 5722 - DNA, 120 bp, synthetic construct
  source 1..120: mol_type = other DNA
aatgaatgggaggtagagtgtattgggatagttgtaagttagttggttgattttatggtagatataggtagaagttttttttgattattattgttttttttgttgaaataagtataattt

SEQ ID NO: 5723 - DNA, 120 bp, synthetic construct
  source 1..120: mol_type = other DNA
aacaaaataaataaaaaacaaaatatattaaaacaattataaactaattaattaatttcataataaaaatcccttctaattattactatctttcttattaaaataaacacaactttaaaa

SEQ ID NO: 5724 - DNA, 120 bp, synthetic construct
  source 1..120: mol_type = other DNA
agtagaatgaatgggaggtagagtgtattgggatagttgtaagttagttggttgattttatggtagaagttttttttgattattattgttttttttgttgaaataagtataattttaaga

SEQ ID NO: 5725 - DNA, 120 bp, synthetic construct; identical to SEQ ID NO: 5721
  source 1..120: mol_type = other DNA

SEQ ID NO: 5726 - DNA, 120 bp, synthetic construct; identical to SEQ ID NO: 5722
  source 1..120: mol_type = other DNA

SEQ ID NO: 5727 - DNA, 120 bp, synthetic construct; identical to SEQ ID NO: 5723
  source 1..120: mol_type = other DNA

SEQ ID NO: 5728 - DNA, 120 bp, synthetic construct; identical to SEQ ID NO: 5724
  source 1..120: mol_type = other DNA

SEQ ID NO: 5729 - DNA, 120 bp, synthetic construct
  source 1..120: mol_type = other DNA
caataaaataaaaataattatcctcaaaaaaaaaaaaattaaaaaattataataccaaaatattatataaaatacacatataaatacaacaataatatataatcaaccccatcaaaccca

SEQ ID NO: 5730 - DNA, 120 bp, synthetic construct
  source 1..120: mol_type = other DNA
taatgaggtaaaagtgattatttttagagaaaagaaaattaaggaattgtgatgttaaggtgttatgtggaatatgtatgtgaatataataatagtatgtgattaattttattaaattta

SEQ ID NO: 5731 - DNA, 120 bp, synthetic construct
  source 1..120: mol_type = other DNA
aactacaataaaataaaaataattatcctcaaaaaaaaaaaaattaaaaaattataataccataaaatacacatataaatacaacaataatatataatcaaccccatcaaacccaataaa

SEQ ID NO: 5732 - DNA, 120 bp, synthetic construct
  source 1..120: mol_type = other DNA
ggttgtaatgaggtaaaagtgattatttttagagaaaagaaaattaaggaattgtgatgttgtggaatatgtatgtgaatataataatagtatgtgattaattttattaaatttagtaag

SEQ ID NO: 5733 - DNA, 120 bp, synthetic construct
  source 1..120: mol_type = other DNA
caataaaataaaaataattatcctcaaaaaaaaaaaaattaaaaaattataataccaaaatattatataaaatacgcatataaatacaacaataatatataatcaaccccatcaaaccca

SEQ ID NO: 5734 - DNA, 120 bp, synthetic construct
  source 1..120: mol_type = other DNA
taatgaggtaaaagtgattatttttagagaaaagaaaattaaggaattgtgatgttaaggtgttatgtggaatacgtatgtgaatataataatagtatgtgattaattttattaaattta

SEQ ID NO: 5735 - DNA, 120 bp, synthetic construct
  source 1..120: mol_type = other DNA
aactacaataaaataaaaataattatcctcaaaaaaaaaaaaattaaaaaattataataccgtaaaatacgcatataaatacaacaataatatataatcaaccccatcaaacccaataaa

SEQ ID NO: 5736 - DNA, 120 bp, synthetic construct
  source 1..120: mol_type = other DNA
ggttgtaatgaggtaaaagtgattatttttagagaaaagaaaattaaggaattgtgatgtcgtggaatacgtatgtgaatataataatagtatgtgattaattttattaaatttagtaag

SEQ ID NO: 5737 - DNA, 120 bp, synthetic construct
  source 1..120: mol_type = other DNA
aaaaaccaacataaaaatttaaacaaaaaaaacaaaacataatttttttaataataaaactttaacaacacattaaaatataatttaaaaacaaataaaaaaaaaaacaattatacctcc

SEQ ID NO: 5738 - DNA, 120 bp, synthetic construct
  source 1..120: mol_type = other DNA
ggaaattagtataagaatttaagtagggaagataaagtataatttttttaataataaagttttgatagtatgttgaaatatggtttgaggataggtaaaagaggaagtaattgtattttt

SEQ ID NO: 5739 - DNA, 120 bp, synthetic construct
  source 1..120: mol_type = other DNA
aataaaaaaccaacataaaaatttaaacaaaaaaaacaaaacataatttttttaataataaaacacattaaaatataatttaaaaacaaataaaaaaaaaaacaattatacctccttact

SEQ ID NO: 5740 - DNA, 120 bp, synthetic construct
  source 1..120: mol_type = other DNA
agtaggaaattagtataagaatttaagtagggaagataaagtataatttttttaataataaagtatgttgaaatatggtttgaggataggtaaaagaggaagtaattgtatttttttgtt

SEQ ID NO: 5741 - DNA, 120 bp, synthetic construct
  source 1..120: mol_type = other DNA
aaaaaccaacataaaaatttaaacaaaaaaaacaaaacataatttttttaataataaaactttaacaacacgttaaaatataatttaaaaacaaataaaaaaaaaaacaattatacctcc

SEQ ID NO: 5742 - DNA, 120 bp, synthetic construct
  source 1..120: mol_type = other DNA
ggaaattagtataagaatttaagtagggaagataaagtataatttttttaataataaagttttgatagtacgttgaaatatggtttgaggataggtaaaagaggaagtaattgtattttt

SEQ ID NO: 5743 - DNA, 120 bp, synthetic construct
  source 1..120: mol_type = other DNA
aataaaaaaccaacataaaaatttaaacaaaaaaaacaaaacataatttttttaataataaaacacgttaaaatataatttaaaaacaaataaaaaaaaaaacaattatacctccttact

SEQ ID NO: 5744 - DNA, 120 bp, synthetic construct
  source 1..120: mol_type = other DNA
agtaggaaattagtataagaatttaagtagggaagataaagtataatttttttaataataaagtacgttgaaatatggtttgaggataggtaaaagaggaagtaattgtatttttttgtt

SEQ ID NO: 5745 - DNA, 120 bp, synthetic construct
  source 1..120: mol_type = other DNA
aaaaaaacaaaaataccaaatctaccatttactacataaaatttaaaataaaactataaacaatacataataatataattcaacaaatttttctctctctaaaaaactaaaaaataacct

SEQ ID NO: 5746 - DNA, 120 bp, synthetic construct
  source 1..120: mol_type = other DNA
aagaaaatgagaatgttagatttattatttgttatatagggtttaaaatgaagttatgaataatgtataataatgtaatttaataagtttttttttttttggaggattggaaaataattt

SEQ ID NO: 5747 - DNA, 120 bp, synthetic construct
  source 1..120: mol_type = other DNA
aacaaaaataccaaatctaccatttactacataaaatttaaaataaaactataaacacttttataaaatacataataatataattcaacaaatttttctctctctaaaaaactaaaaaat

SEQ ID NO: 5748 - DNA, 120 bp, synthetic construct
  source 1..120: mol_type = other DNA
aatgagaatgttagatttattatttgttatatagggtttaaaatgaagttatgaatatttttgtaaaatgtataataatgtaatttaataagtttttttttttttggaggattggaaaat

SEQ ID NO: 5749 - DNA, 120 bp, synthetic construct
  source 1..120: mol_type = other DNA
aaaaaaacgaaaataccaaatctaccatttactacataaaatttaaaataaaactataaacaatacataataatataattcaacaaatttttctctctctaaaaaactaaaaaataacct

SEQ ID NO: 5750 - DNA, 120 bp, synthetic construct
  source 1..120: mol_type = other DNA
aagaaaacgagaatgttagatttattatttgttatatagggtttaaaatgaagttatgaataatgtataataatgtaatttaataagtttttttttttttggaggattggaaaataattt

SEQ ID NO: 5751 - DNA, 120 bp, synthetic construct
  source 1..120: mol_type = other DNA
aacgaaaataccaaatctaccatttactacataaaatttaaaataaaactataaacacttttataaaatacataataatataattcaacaaatttttctctctctaaaaaactaaaaaat

SEQ ID NO: 5752 - DNA, 120 bp, synthetic construct
  source 1..120: mol_type = other DNA
aacgagaatgttagatttattatttgttatatagggtttaaaatgaagttatgaatatttttgtaaaatgtataataatgtaatttaataagtttttttttttttggaggattggaaaat

SEQ ID NO: 5753 - DNA, 120 bp, synthetic construct
  source 1..120: mol_type = other DNA
aaatctatacccattatttcaaaaaatcttataaaacatctcaaaacttcaaaaaccaaccctcttccatccacccaactctacccaccaccactaccaaactaaacaaaaaactaatac

SEQ ID NO: 5754 - DNA, 120 bp, synthetic construct
  source 1..120: mol_type = other DNA
aagtttgtgtttattgttttaggggattttatggagtattttagggttttaggagttagtttttttttatttgtttggttttgtttattattattgttaggttgaataggggattagtgt

SEQ ID NO: 5755 - DNA, 120 bp, synthetic construct
  source 1..120: mol_type = other DNA
tatacccattatttcaaaaaatcttataaaacatctcaaaacttcaaaaaccaaccctctatatactcttccatccacccaactctacccaccaccactaccaaactaaacaaaaaacta

SEQ ID NO: 5756 - DNA, 120 bp, synthetic construct
  source 1..120: mol_type = other DNA
tgtgtttattgttttaggggattttatggagtattttagggttttaggagttagttttttatgtgtttttttatttgtttggttttgtttattattattgttaggttgaataggggatta

SEQ ID NO: 5757 - DNA, 120 bp, synthetic construct
  source 1..120: mol_type = other DNA
aaatctatacccattatttcaaaaaatcttataaaacatctcaaaacttcaaaaaccaaccctcttccatccgcccgactctacccaccaccactaccaaactaaacaaaaaactaatac

SEQ ID NO: 5758 - DNA, 120 bp, synthetic construct
  source 1..120: mol_type = other DNA
aagtttgtgtttattgttttaggggattttatggagtattttagggttttaggagttagtttttttttattcgttcggttttgtttattattattgttaggttgaataggggattagtgt

SEQ ID NO: 5759 - DNA, 120 bp, synthetic construct
  source 1..120: mol_type = other DNA
tatacccattatttcaaaaaatcttataaaacatctcaaaacttcaaaaaccaaccctctatatactcttccatccgcccgactctacccaccaccactaccaaactaaacaaaaaacta

SEQ ID NO: 5760 - DNA, 120 bp, synthetic construct
  source 1..120: mol_type = other DNA
tgtgtttattgttttaggggattttatggagtattttagggttttaggagttagttttttatgtgtttttttattcgttcggttttgtttattattattgttaggttgaataggggatta

SEQ ID NO: 5761 - DNA, 120 bp, synthetic construct
  source 1..120: mol_type = other DNA
cctcactcacattatctccatcctaaccattcttctctaaaaaaatttcttttaactaatataaaacaccaaaattaaaaattaaaatcaaatacaatcttattacctaaaactactcta

SEQ ID NO: 5762 - DNA, 120 bp, synthetic construct
  source 1..120: mol_type = other DNA
ttttatttatgttgtttttattttggttatttttttttgaaaaagttttttttggttaatgtaaaatattaaggttgaaaattgaagttagatgtagttttattatttgaaattgttttg

SEQ ID NO: 5763 - DNA, 120 bp, synthetic construct
  source 1..120: mol_type = other DNA
actcacattatctccatcctaaccattcttctctaaaaaaatttcttttaactaatatcactctttaaaacaccaaaattaaaaattaaaatcaaatacaatcttattacctaaaactac

SEQ ID NO: 5764 - DNA, 120 bp, synthetic construct
  source 1..120: mol_type = other DNA
atttatgttgtttttattttggttatttttttttgaaaaagttttttttggttaatgttattttttaaaatattaaggttgaaaattgaagttagatgtagttttattatttgaaattgt

SEQ ID NO: 5765 - DNA, 120 bp, synthetic construct
  source 1..120: mol_type = other DNA
cctcactcacgttatctccatcctaaccattcttctctaaaaaaatttcttttaactaatataaaacaccaaaattaaaaattaaaatcaaatacaatcttattacctaaaactactcta

SEQ ID NO: 5766 - DNA, 120 bp, synthetic construct
  source 1..120: mol_type = other DNA
ttttatttacgttgtttttattttggttatttttttttgaaaaagttttttttggttaatgtaaaatattaaggttgaaaattgaagttagatgtagttttattatttgaaattgttttg

SEQ ID NO: 5767 - DNA, 120 bp, synthetic construct
  source 1..120: mol_type = other DNA
actcacgttatctccatcctaaccattcttctctaaaaaaatttcttttaactaatatcactctttaaaacaccaaaattaaaaattaaaatcaaatacaatcttattacctaaaactac

SEQ ID NO: 5768 - DNA, 120 bp, synthetic construct
  source 1..120: mol_type = other DNA
atttacgttgtttttattttggttatttttttttgaaaaagttttttttggttaatgttattttttaaaatattaaggttgaaaattgaagttagatgtagttttattatttgaaattgt

SEQ ID NO: 5769 - DNA, 120 bp, synthetic construct
  source 1..120: mol_type = other DNA
tttcctccctttaataataaaaattaataaatataatatcaaaacctaaaaaataattaacaaacaacatcaataacaataaaaaacaaaatttcataaaaatataaaaataatttttat

SEQ ID NO: 5770 - DNA, 120 bp, synthetic construct
  source 1..120: mol_type = other DNA
ttttttttttttaataataaagattaatggatatagtgttaaagtttgaggaatggttaatagataatattagtgatagtgaagaataagattttatggaagtatgaaaataatttttgt

SEQ ID NO: 5771 - DNA, 120 bp, synthetic construct
  source 1..120: mol_type = other DNA
atatttcctccctttaataataaaaattaataaatataatatcaaaacctaaaaaataattaacatcaataacaataaaaaacaaaatttcataaaaatataaaaataatttttattttc

SEQ ID NO: 5772 - DNA, 120 bp, synthetic construct
  source 1..120: mol_type = other DNA
gtgttttttttttttaataataaagattaatggatatagtgttaaagtttgaggaatggttaatattagtgatagtgaagaataagattttatggaagtatgaaaataatttttgttttt

SEQ ID NO: 5773 - DNA, 120 bp, synthetic construct; identical to SEQ ID NO: 5769
  source 1..120: mol_type = other DNA

SEQ ID NO: 5774 - DNA, 120 bp, synthetic construct; identical to SEQ ID NO: 5770
  source 1..120: mol_type = other DNA

SEQ ID NO: 5775 - DNA, 120 bp, synthetic construct; identical to SEQ ID NO: 5771
  source 1..120: mol_type = other DNA

SEQ ID NO: 5776 - DNA, 120 bp, synthetic construct; identical to SEQ ID NO: 5772
  source 1..120: mol_type = other DNA

SEQ ID NO: 5777 - DNA, 120 bp, synthetic construct
  source 1..120: mol_type = other DNA
tctcaattattatcctacattattttactatataataaacaaaaaattctcaaaaaaacataaatcatataaaatctttccccaactctacatatcttaaaaacatctcaaatattctct

SEQ ID NO: 5778 - DNA, 120 bp, synthetic construct
  source 1..120: mol_type = other DNA
ttttagttattgttttgtattgttttgttatgtgatgagtgaaggatttttagggaaatatgaattatgtgggatttttttttaattttgtgtgttttggggatattttaggtgtttttt

SEQ ID NO: 5779 - DNA, 120 bp, synthetic construct
  source 1..120: mol_type = other DNA
aaatctcaattattatcctacattattttactatataataaacaaaaaattctcaaaaaaacatataaaatctttccccaactctacatatcttaaaaacatctcaaatattctctaaac

SEQ ID NO: 5780 - DNA, 120 bp, synthetic construct
  source 1..120: mol_type = other DNA
agattttagttattgttttgtattgttttgttatgtgatgagtgaaggatttttagggaaatatgtgggatttttttttaattttgtgtgttttggggatattttaggtgttttttaggt

SEQ ID NO: 5781 - DNA, 120 bp, synthetic construct
  source 1..120: mol_type = other DNA
tctcaattattatcctacattattttactatataataaacgaaaaattctcaaaaaaacataaatcatataaaatctttccccaactctacgtatcttaaaaacatctcaaatattctct

SEQ ID NO: 5782 - DNA, 120 bp, synthetic construct
  source 1..120: mol_type = other DNA
ttttagttattgttttgtattgttttgttatgtgatgagcgaaggatttttagggaaatatgaattatgtgggatttttttttaattttgcgtgttttggggatattttaggtgtttttt

SEQ ID NO: 5783 - DNA, 120 bp, synthetic construct
  source 1..120: mol_type = other DNA
aaatctcaattattatcctacattattttactatataataaacgaaaaattctcaaaaaaacatataaaatctttccccaactctacgtatcttaaaaacatctcaaatattctctaaac

SEQ ID NO: 5784 - DNA, 120 bp, synthetic construct
  source 1..120: mol_type = other DNA
agattttagttattgttttgtattgttttgttatgtgatgagcgaaggatttttagggaaatatgtgggatttttttttaattttgcgtgttttggggatattttaggtgttttttaggt

SEQ ID NO: 5785 - DNA, 120 bp, synthetic construct
  source 1..120: mol_type = other DNA
caccaaaaaacctaactacttataaaaacaaattcataaaaaaatctactttttaaaacaataatttctttaaacctcttccttcttaaaacacaataatataacatcttattttaaatc

SEQ ID NO: 5786 - DNA, 120 bp, synthetic construct
  source 1..120: mol_type = other DNA
tattagaaaatttaattatttataagagtagatttatggaaaaatttgttttttagggtaataatttttttaaatttttttttttttaaaatataataatatgatattttattttggatt

SEQ ID NO: 5787 - DNA, 120 bp, synthetic construct
  source 1..120: mol_type = other DNA
acacacaccaaaaaacctaactacttataaaaacaaattcataaaaaaatctactttttaatctttaaacctcttccttcttaaaacacaataatataacatcttattttaaatcctaaa

SEQ ID NO: 5788 - DNA, 120 bp, synthetic construct
  source 1..120: mol_type = other DNA
atatatattagaaaatttaattatttataagagtagatttatggaaaaatttgttttttagtttttaaatttttttttttttaaaatataataatatgatattttattttggattttgga

SEQ ID NO: 5789 - DNA, 120 bp, synthetic construct; identical to SEQ ID NO: 5785
  source 1..120: mol_type = other DNA

SEQ ID NO: 5790 - DNA, 120 bp, synthetic construct; identical to SEQ ID NO: 5786
  source 1..120: mol_type = other DNA

SEQ ID NO: 5791 - DNA, 120 bp, synthetic construct; identical to SEQ ID NO: 5787
  source 1..120: mol_type = other DNA

SEQ ID NO: 5792 - DNA, 120 bp, synthetic construct; identical to SEQ ID NO: 5788
  source 1..120: mol_type = other DNA

SEQ ID NO: 5793 - DNA, 120 bp, synthetic construct
  source 1..120: mol_type = other DNA
cattatatataaaaatatataatctaattaaatataatatttaaaattcccatcacatattataaattaaacataatattcttaatcatattaaactaaaaaaaaaactctaattaaaat

SEQ ID NO: 5794 - DNA, 120 bp, synthetic construct
  source 1..120: mol_type = other DNA
tattatatatgaaaatgtataatttaattgggtatagtatttgggatttttattgtatattatgggttaaatatagtatttttagttatattaagttggaaggaaaattttaattaaggt

SEQ ID NO: 5795 - DNA, 120 bp, synthetic construct
  source 1..120: mol_type = other DNA
catatcattatatataaaaatatataatctaattaaatataatatttaaaattcccatcacttaaacataatattcttaatcatattaaactaaaaaaaaaactctaattaaaattatac

SEQ ID NO: 5796 - DNA, 120 bp, synthetic construct
  source 1..120: mol_type = other DNA
tatattattatatatgaaaatgtataatttaattgggtatagtatttgggatttttattgtttaaatatagtatttttagttatattaagttggaaggaaaattttaattaaggttatgt

SEQ ID NO: 5797 - DNA, 120 bp, synthetic construct
  source 1..120: mol_type = other DNA
cattatatataaaaatatataatctaattaaatataatatttaaaattcccatcgcatattataaattaaacataatattcttaatcatattaaactaaaaaaaaaactctaattaaaat

SEQ ID NO: 5798 - DNA, 120 bp, synthetic construct
  source 1..120: mol_type = other DNA
tattatatatgaaaatgtataatttaattgggtatagtatttgggatttttatcgtatattatgggttaaatatagtatttttagttatattaagttggaaggaaaattttaattaaggt

SEQ ID NO: 5799 - DNA, 120 bp, synthetic construct
  source 1..120: mol_type = other DNA
catatcattatatataaaaatatataatctaattaaatataatatttaaaattcccatcgcttaaacataatattcttaatcatattaaactaaaaaaaaaactctaattaaaattatac

SEQ ID NO: 5800 - DNA, 120 bp, synthetic construct
  source 1..120: mol_type = other DNA
tatattattatatatgaaaatgtataatttaattgggtatagtatttgggatttttatcgtttaaatatagtatttttagttatattaagttggaaggaaaattttaattaaggttatgt

SEQ ID NO: 5801 - DNA, 120 bp, synthetic construct
  source 1..120: mol_type = other DNA
ataccacctacataaacattttacataatcaaattaaaatttacataatacatacatacaaaaaaatatataaaaaccaaatatataaaataatacattaacaaacttcatatatataaa

SEQ ID NO: 5802 - DNA, 120 bp, synthetic construct
  source 1..120: mol_type = other DNA
atgttatttatataggtattttgtatggttagattggaatttatataatgtatatatgtaaagaaatatatagaagttagatatataaggtagtatattggtaggttttatatatataga

SEQ ID NO: 5803 - DNA, 120 bp, synthetic construct
  source 1..120: mol_type = other DNA
acctacataaacattttacataatcaaattaaaatttacataatacatacatacaaaaaaatatacaaaaatatataaaaaccaaatatataaaataatacattaacaaacttcatatat

SEQ ID NO: 5804 - DNA, 120 bp, synthetic construct
  source 1..120: mol_type = other DNA
atttatataggtattttgtatggttagattggaatttatataatgtatatatgtaaagaagtatgtagaaatatatagaagttagatatataaggtagtatattggtaggttttatatat

SEQ ID NO: 5805 - DNA, 120 bp, synthetic construct; identical to SEQ ID NO: 5801
  source 1..120: mol_type = other DNA

SEQ ID NO: 5806 - DNA, 120 bp, synthetic construct; identical to SEQ ID NO: 5802
  source 1..120: mol_type = other DNA

SEQ ID NO: 5807 - DNA, 120 bp, synthetic construct; identical to SEQ ID NO: 5803
  source 1..120: mol_type = other DNA

SEQ ID NO: 5808 - DNA, 120 bp, synthetic construct; identical to SEQ ID NO: 5804
  source 1..120: mol_type = other DNA

SEQ ID NO: 5809 - DNA, 120 bp, synthetic construct
  source 1..120: mol_type = other DNA
ccaattataactaaaaataaacatatacaacaaccttaacttaaaaaaattataattaccaaacaaaaacttaaatcataccacctataaaccaccaaaatctacaaaaataataactaa

SEQ ID NO: 5810 - DNA, 120 bp, synthetic construct
  source 1..120: mol_type = other DNA
ttaattataattgaaaatggatatgtatagtaattttggtttgagaaggttgtggttattaaataaaggtttgagttatattatttgtaagttattaagatttgtagaggtgatagttga

SEQ ID NO: 5811 - DNA, 120 bp, synthetic construct
  source 1..120: mol_type = other DNA
tataactaaaaataaacatatacaacaaccttaacttaaaaaaattataattaccactactcaaaaacaaaaacttaaatcataccacctataaaccaccaaaatctacaaaaataataa

SEQ ID NO: 5812 - DNA, 120 bp, synthetic construct
  source 1..120: mol_type = other DNA
tataattgaaaatggatatgtatagtaattttggtttgagaaggttgtggttattattatttaggaataaaggtttgagttatattatttgtaagttattaagatttgtagaggtgatag

SEQ ID NO: 5813 - DNA, 120 bp, synthetic construct; identical to SEQ ID NO: 5809
  source 1..120: mol_type = other DNA

SEQ ID NO: 5814 - DNA, 120 bp, synthetic construct; identical to SEQ ID NO: 5810
  source 1..120: mol_type = other DNA

SEQ ID NO: 5815 - DNA, 120 bp, synthetic construct; identical to SEQ ID NO: 5811
  source 1..120: mol_type = other DNA

SEQ ID NO: 5816 - DNA, 120 bp, synthetic construct; identical to SEQ ID NO: 5812
  source 1..120: mol_type = other DNA

SEQ ID NO: 5817 - DNA, 120 bp, synthetic construct
  source 1..120: mol_type = other DNA
aataatacaaaaacttaactcatctattaaattcacacaaacaaaaaatcaaaaccaatattaataatttcaaaaatataaacaacccataaatatcaacaaaacaaaatacaatttaaa

SEQ ID NO: 5818 - DNA, 120 bp, synthetic construct
  source 1..120: mol_type = other DNA
gataatataaaagtttggtttatttattagatttatataaataagagattaaagttaatgttaataattttaaggatataagtaatttataagtattagtaaaatgaggtgtagtttagg

SEQ ID NO: 5819 - DNA, 120 bp, synthetic construct
  source 1..120: mol_type = other DNA
tacaaaaacttaactcatctattaaattcacacaaacaaaaaatcaaaaccaatattaaaccttactaataatttcaaaaatataaacaacccataaatatcaacaaaacaaaatacaat

SEQ ID NO: 5820 - DNA, 120 bp, synthetic construct
  source 1..120: mol_type = other DNA
tataaaagtttggtttatttattagatttatataaataagagattaaagttaatgttaagttttattaataattttaaggatataagtaatttataagtattagtaaaatgaggtgtagt

SEQ ID NO: 5821 - DNA, 120 bp, synthetic construct
  source 1..120: mol_type = other DNA
aataatacaaaaacttaactcatctattaaattcacacaaacaaaaaatcaaaaccaatattaataatttcaaaaatataaacaacccataaatatcaacaaaacgaaatacaatttaaa

SEQ ID NO: 5822 - DNA, 120 bp, synthetic construct
  source 1..120: mol_type = other DNA
gataatataaaagtttggtttatttattagatttatataaataagagattaaagttaatgttaataattttaaggatataagtaatttataagtattagtaaaacgaggtgtagtttagg

SEQ ID NO: 5823 - DNA, 120 bp, synthetic construct
  source 1..120: mol_type = other DNA
tacaaaaacttaactcatctattaaattcacacaaacaaaaaatcaaaaccaatattaaaccttactaataatttcaaaaatataaacaacccataaatatcaacaaaacgaaatacaat

SEQ ID NO: 5824 - DNA, 120 bp, synthetic construct
  source 1..120: mol_type = other DNA
tataaaagtttggtttatttattagatttatataaataagagattaaagttaatgttaagttttattaataattttaaggatataagtaatttataagtattagtaaaacgaggtgtagt

SEQ ID NO: 5825 - DNA, 120 bp, synthetic construct
  source 1..120: mol_type = other DNA
aatttttatcaaaaaatatctatattctcacattatctattaaaaaacaaaaataacaatttaaaaaattaattaacaaattctaaaaaataatcaataaaacaattataacaaaaaata

SEQ ID NO: 5826 - DNA, 120 bp, synthetic construct
  source 1..120: mol_type = other DNA
gatttttgttagaaaatatttatatttttatattgtttgttgagggatagaggtggtagtttggaagattgattggtaagttttaagagatggttaatgaagtaattatagtggaagatg

SEQ ID NO: 5827 - DNA, 120 bp, synthetic construct
  source 1..120: mol_type = other DNA
accaaatttttatcaaaaaatatctatattctcacattatctattaaaaaacaaaaataacaaattaattaacaaattctaaaaaataatcaataaaacaattataacaaaaaatattat

SEQ ID NO: 5828 - DNA, 120 bp, synthetic construct
  source 1..120: mol_type = other DNA
attagatttttgttagaaaatatttatatttttatattgtttgttgagggatagaggtggtagattgattggtaagttttaagagatggttaatgaagtaattatagtggaagatgttgt

SEQ ID NO: 5829 - DNA, 120 bp, synthetic construct
  source 1..120: mol_type = other DNA
aatttttatcaaaaaatatctatattctcacattatctattaaaaaacaaaaataacaatttaaaaaattaattaacaaattctaaaaaataatcaataaaacaattataacgaaaaata

SEQ ID NO: 5830 - DNA, 120 bp, synthetic construct
  source 1..120: mol_type = other DNA
gatttttgttagaaaatatttatatttttatattgtttgttgagggatagaggtggtagtttggaagattgattggtaagttttaagagatggttaatgaagtaattatagcggaagatg

SEQ ID NO: 5831 - DNA, 120 bp, synthetic construct
  source 1..120: mol_type = other DNA
accaaatttttatcaaaaaatatctatattctcacattatctattaaaaaacaaaaataacaaattaattaacaaattctaaaaaataatcaataaaacaattataacgaaaaatattat

SEQ ID NO: 5832 - DNA, 120 bp, synthetic construct
  source 1..120: mol_type = other DNA
attagatttttgttagaaaatatttatatttttatattgtttgttgagggatagaggtggtagattgattggtaagttttaagagatggttaatgaagtaattatagcggaagatgttgt

SEQ ID NO: 5833 - DNA, 120 bp, synthetic construct
  source 1..120: mol_type = other DNA
tcaaacacttccttaaacatactaaataaaaacatcaatttaaccaatacctattaaaaaactatatctttctaaaaaatatattatttaattctaattataattaactttacttattac

SEQ ID NO: 5834 - DNA, 120 bp, synthetic construct
  source 1..120: mol_type = other DNA
ttaaatgtttttttagatgtattgaataaaagtattagtttagttggtatttgttaagaggttatgtttttttaagagatgtgttatttgattttaattataattaattttgtttattat

SEQ ID NO: 5835 - DNA, 120 bp, synthetic construct
  source 1..120: mol_type = other DNA
cacttccttaaacatactaaataaaaacatcaatttaaccaatacctattaaaaaacccactaaaactatatctttctaaaaaatatattatttaattctaattataattaactttactt

SEQ ID NO: 5836 - DNA, 120 bp, synthetic construct
  source 1..120: mol_type = other DNA
tgtttttttagatgtattgaataaaagtattagtttagttggtatttgttaagaggtttattaggattatgtttttttaagagatgtgttatttgattttaattataattaattttgttt

SEQ ID NO: 5837 - DNA, 120 bp, synthetic construct
  source 1..120: mol_type = other DNA
tcaaacgcttccttaaacgtactaaataaaaacatcaatttaaccgatacctattaaaaaactatatctttctaaaaaatatattatttaattctaattataattaactttacttattac

SEQ ID NO: 5838 - DNA, 120 bp, synthetic construct
  source 1..120: mol_type = other DNA
ttaaacgtttttttagacgtattgaataaaagtattagtttagtcggtatttgttaagaggttatgtttttttaagagatgtgttatttgattttaattataattaattttgtttattat

SEQ ID NO: 5839 - DNA, 120 bp, synthetic construct
  source 1..120: mol_type = other DNA
cgcttccttaaacgtactaaataaaaacatcaatttaaccgatacctattaaaaaacccactaaaactatatctttctaaaaaatatattatttaattctaattataattaactttactt

SEQ ID NO: 5840 - DNA, 120 bp, synthetic construct
  source 1..120: mol_type = other DNA
cgtttttttagacgtattgaataaaagtattagtttagtcggtatttgttaagaggtttattaggattatgtttttttaagagatgtgttatttgattttaattataattaattttgttt

SEQ ID NO: 5841 - DNA, 120 bp, synthetic construct
  source 1..120: mol_type = other DNA
caccatacaccttaaaaaattctccaaaaattaattatttaataaaacaacataaaaacaactttcaaacaaaaatattacttccacctttctctatccaattaacatttcaaatctatc

SEQ ID NO: 5842 - DNA, 120 bp, synthetic construct
  source 1..120: mol_type = other DNA
tattatatattttgaggaattttttaagaattagttatttagtaaaataatataaaagtagtttttagataggagtattatttttatttttttttatttaattggtattttaagtttatt

SEQ ID NO: 5843 - DNA, 120 bp, synthetic construct
  source 1..120: mol_type = other DNA
taccaccatacaccttaaaaaattctccaaaaattaattatttaataaaacaacataaaaacaaacaaaaatattacttccacctttctctatccaattaacatttcaaatctatcttct

SEQ ID NO: 5844 - DNA, 120 bp, synthetic construct
  source 1..120: mol_type = other DNA
tgttattatatattttgaggaattttttaagaattagttatttagtaaaataatataaaagtagataggagtattatttttatttttttttatttaattggtattttaagtttatttttt

SEQ ID NO: 5845 - DNA, 120 bp, synthetic construct; identical to SEQ ID NO: 5841
  source 1..120: mol_type = other DNA

SEQ ID NO: 5846 - DNA, 120 bp, synthetic construct; identical to SEQ ID NO: 5842
  source 1..120: mol_type = other DNA

SEQ ID NO: 5847 - DNA, 120 bp, synthetic construct; identical to SEQ ID NO: 5843
  source 1..120: mol_type = other DNA

SEQ ID NO: 5848 - DNA, 120 bp, synthetic construct; identical to SEQ ID NO: 5844
  source 1..120: mol_type = other DNA

SEQ ID NO: 5849 - DNA, 120 bp, synthetic construct
  source 1..120: mol_type = other DNA
ttcttaataacctcctataaaataaaattttaaaaattaaaactaattttaaaaaaaaattaaaatataaatataaaatattaaataaaaacaactaaaaaatccaaaaacaatatacaa

SEQ ID NO: 5850 - DNA, 120 bp, synthetic construct
  source 1..120: mol_type = other DNA
tttttgatgattttttataggataagattttgagaattgaggttggttttgaggagaggttgggatgtagatgtagagtgttggatgagagtagttagggaatttaaggatagtgtgtaa

SEQ ID NO: 5851 - DNA, 120 bp, synthetic construct
  source 1..120: mol_type = other DNA
taataacctcctataaaataaaattttaaaaattaaaactaattttaaaaaaaaattaacaaaaaaaatataaatataaaatattaaataaaaacaactaaaaaatccaaaaacaatata

SEQ ID NO: 5852 - DNA, 120 bp, synthetic construct
  source 1..120: mol_type = other DNA
tgatgattttttataggataagattttgagaattgaggttggttttgaggagaggttggtaaaagggatgtagatgtagagtgttggatgagagtagttagggaatttaaggatagtgtg

SEQ ID NO: 5853 - DNA, 120 bp, synthetic construct; identical to SEQ ID NO: 5849
  source 1..120: mol_type = other DNA

SEQ ID NO: 5854 - DNA, 120 bp, synthetic construct; identical to SEQ ID NO: 5850
  source 1..120: mol_type = other DNA

SEQ ID NO: 5855 - DNA, 120 bp, synthetic construct; identical to SEQ ID NO: 5851
  source 1..120: mol_type = other DNA

SEQ ID NO: 5856 - DNA, 120 bp, synthetic construct; identical to SEQ ID NO: 5852
  source 1..120: mol_type = other DNA

SEQ ID NO: 5857 - DNA, 120 bp, synthetic construct
  source 1..120: mol_type = other DNA
caaaaaaattctatttatatttttatcttttctaaaatatactttttcataaatttaataaaaataaaaaacaaaaatacaacaattaaactatatttcattaaatttatatattataaa

SEQ ID NO: 5858 - DNA, 120 bp, synthetic construct
  source 1..120: mol_type = other DNA
tagggagattttatttatatttttgttttttttaaagtatgtttttttatggatttgatgaaaatggagagtaagagtataataattaaattgtgttttattgagtttgtatgttgtgag

SEQ ID NO: 5859 - DNA, 120 bp, synthetic construct
  source 1..120: mol_type = other DNA
aaaattctatttatatttttatcttttctaaaatatactttttcataaatttaataacaaaaaaaaaataaaaaacaaaaatacaacaattaaactatatttcattaaatttatatatta

SEQ ID NO: 5860 - DNA, 120 bp, synthetic construct
  source 1..120: mol_type = other DNA
gagattttatttatatttttgttttttttaaagtatgtttttttatggatttgatgatagggaggaaatggagagtaagagtataataattaaattgtgttttattgagtttgtatgttg

SEQ ID NO: 5861 - DNA, 120 bp, synthetic construct; identical to SEQ ID NO: 5857
  source 1..120: mol_type = other DNA

SEQ ID NO: 5862 - DNA, 120 bp, synthetic construct; identical to SEQ ID NO: 5858
  source 1..120: mol_type = other DNA

SEQ ID NO: 5863 - DNA, 120 bp, synthetic construct; identical to SEQ ID NO: 5859
  source 1..120: mol_type = other DNA

SEQ ID NO: 5864 - DNA, 120 bp, synthetic construct; identical to SEQ ID NO: 5860
  source 1..120: mol_type = other DNA

SEQ ID NO: 5865 - DNA, 120 bp, synthetic construct
  source 1..120: mol_type = other DNA
cataaatatcattcatttccttaataaaatcttaatcatcttacaataatcatttaaacatcaaaaaatcttccacaaaacctcaaaaaatctcaatttaaaccaaatcacatttctcta

SEQ ID NO: 5866 - DNA, 120 bp, synthetic construct
  source 1..120: mol_type = other DNA
tatgaatattatttatttttttggtaggattttaattattttgtaataattatttgaatattaggaagttttttataaaattttaagaaattttagtttgggttaagttatattttttta

SEQ ID NO: 5867 - DNA, 120 bp, synthetic construct
  source 1..120: mol_type = other DNA
atatcattcatttccttaataaaatcttaatcatcttacaataatcatttaaacatcatctcctccaaaaaatcttccacaaaacctcaaaaaatctcaatttaaaccaaatcacatttc

SEQ ID NO: 5868 - DNA, 120 bp, synthetic construct
  source 1..120: mol_type = other DNA
atattatttatttttttggtaggattttaattattttgtaataattatttgaatattattttttttaggaagttttttataaaattttaagaaattttagtttgggttaagttatatttt

SEQ ID NO: 5869 - DNA, 120 bp, synthetic construct; identical to SEQ ID NO: 5865
  source 1..120: mol_type = other DNA

SEQ ID NO: 5870 - DNA, 120 bp, synthetic construct; identical to SEQ ID NO: 5866
  source 1..120: mol_type = other DNA

SEQ ID NO: 5871 - DNA, 120 bp, synthetic construct; identical to SEQ ID NO: 5867
  source 1..120: mol_type = other DNA

SEQ ID NO: 5872 - DNA, 120 bp, synthetic construct; identical to SEQ ID NO: 5868
  source 1..120: mol_type = other DNA

SEQ ID NO: 5873 - DNA, 120 bp, synthetic construct
  source 1..120: mol_type = other DNA
tacctattcctatttctcttactaaaaatcactccaaaatccttaacaaataatctacttctaatccctaaatttaaaatatcaaaataaattctcaaatcaataaaaaaaaactaaatt

SEQ ID NO: 5874 - DNA, 120 bp, synthetic construct
  source 1..120: mol_type = other DNA
tgtttatttttattttttttgttggaaattgttttaggatttttaataggtggtttgtttttagtttttaaatttggaatgttaaaatggatttttagattaatgggggaaggttgggtt

SEQ ID NO: 5875 - DNA, 120 bp, synthetic construct
  source 1..120: mol_type = other DNA
ctattacctattcctatttctcttactaaaaatcactccaaaatccttaacaaataatctacctaaatttaaaatatcaaaataaattctcaaatcaataaaaaaaaactaaattattca

SEQ ID NO: 5876 - DNA, 120 bp, synthetic construct
  source 1..120: mol_type = other DNA
ttattgtttatttttattttttttgttggaaattgttttaggatttttaataggtggtttgtttaaatttggaatgttaaaatggatttttagattaatgggggaaggttgggttgttta

SEQ ID NO: 5877 - DNA, 120 bp, synthetic construct
  source 1..120: mol_type = other DNA
tacctattcctatttctcttactaaaaatcgctccaaaatccttaacaaataatctacttctaatccctaaatttaaaatatcaaaataaattctcaaatcaataaaaaaaaactaaatt

SEQ ID NO: 5878 - DNA, 120 bp, synthetic construct
  source 1..120: mol_type = other DNA
tgtttatttttattttttttgttggaaatcgttttaggatttttaataggtggtttgtttttagtttttaaatttggaatgttaaaatggatttttagattaatgggggaaggttgggtt

SEQ ID NO: 5879 - DNA, 120 bp, synthetic construct
  source 1..120: mol_type = other DNA
ctattacctattcctatttctcttactaaaaatcgctccaaaatccttaacaaataatctacctaaatttaaaatatcaaaataaattctcaaatcaataaaaaaaaactaaattattca

SEQ ID NO: 5880 - DNA, 120 bp, synthetic construct
  source 1..120: mol_type = other DNA
ttattgtttatttttattttttttgttggaaatcgttttaggatttttaataggtggtttgtttaaatttggaatgttaaaatggatttttagattaatgggggaaggttgggttgttta

SEQ ID NO: 5881 - DNA, 120 bp, synthetic construct
  source 1..120: mol_type = other DNA
aatactcaactaactcatcacaaaacaaaaataaaaaacatttcaaactcaacaatcactctataactcatcaaatataaaaataaaattatttttactctcacaacaataaaacaaaac

SEQ ID NO: 5882 - DNA, 120 bp, synthetic construct
  source 1..120: mol_type = other DNA
aatgtttagttagtttattataaagtagaagtagagaatattttaagtttaatagttattttgtgatttattagatgtgagggtgaagttatttttatttttatagtagtaaaataaaat

SEQ ID NO: 5883 - DNA, 120 bp, synthetic construct
  source 1..120: mol_type = other DNA
taccaatactcaactaactcatcacaaaacaaaaataaaaaacatttcaaactcaacaatcactcatcaaatataaaaataaaattatttttactctcacaacaataaaacaaaacctaa

SEQ ID NO: 5884 - DNA, 120 bp, synthetic construct
  source 1..120: mol_type = other DNA
tattaatgtttagttagtttattataaagtagaagtagagaatattttaagtttaatagttatttattagatgtgagggtgaagttatttttatttttatagtagtaaaataaaatttga

SEQ ID NO: 5885 - DNA, 120 bp, synthetic construct; identical to SEQ ID NO: 5881
  source 1..120: mol_type = other DNA

SEQ ID NO: 5886 - DNA, 120 bp, synthetic construct; identical to SEQ ID NO: 5882
  source 1..120: mol_type = other DNA

SEQ ID NO: 5887 - DNA, 120 bp, synthetic construct; identical to SEQ ID NO: 5883
  source 1..120: mol_type = other DNA

SEQ ID NO: 5888 - DNA, 120 bp, synthetic construct; identical to SEQ ID NO: 5884
  source 1..120: mol_type = other DNA

SEQ ID NO: 5889 - DNA, 120 bp, synthetic construct
  source 1..120: mol_type = other DNA
aactatacatcaaaaaaaaaaaccattttaattttaataataatcatccaaaacaaattttttaaatttctctaaattattttcataaataaacatttatttatttttaacaattttaac

SEQ ID NO: 5890 - DNA, 120 bp, synthetic construct
  source 1..120: mol_type = other DNA
aattatatattagaaggagaaattattttggttttgatggtagttatttaggatagattttttaagtttttttgaattatttttatgaatggatatttatttatttttaataattttaat

SEQ ID NO: 5891 - DNA, 120 bp, synthetic construct
  source 1..120: mol_type = other DNA
tacaaactatacatcaaaaaaaaaaaccattttaattttaataataatcatccaaaacaaatttctctaaattattttcataaataaacatttatttatttttaacaattttaacaattt

SEQ ID NO: 5892 - DNA, 120 bp, synthetic construct
  source 1..120: mol_type = other DNA
tgtaaattatatattagaaggagaaattattttggttttgatggtagttatttaggatagatttttttgaattatttttatgaatggatatttatttatttttaataattttaatagttt

SEQ ID NO: 5893 - DNA, 120 bp, synthetic construct; identical to SEQ ID NO: 5889
  source 1..120: mol_type = other DNA

SEQ ID NO: 5894 - DNA, 120 bp, synthetic construct; identical to SEQ ID NO: 5890
  source 1..120: mol_type = other DNA

SEQ ID NO: 5895 - DNA, 120 bp, synthetic construct; identical to SEQ ID NO: 5891
  source 1..120: mol_type = other DNA

SEQ ID NO: 5896 - DNA, 120 bp, synthetic construct; identical to SEQ ID NO: 5892
  source 1..120: mol_type = other DNA

SEQ ID NO: 5897 - DNA, 120 bp, synthetic construct
  source 1..120: mol_type = other DNA
actacctcaaaaataaataaattctctatcattaaaaatattcaaaaataaacactaataccaattaattaatattataatataaataaaaccattattttatatatatttaaaattatt

SEQ ID NO: 5898 - DNA, 120 bp, synthetic construct
  source 1..120: mol_type = other DNA
gttattttagagataaatgagttttttgttattggaggtatttaagaataagtattaatgttagttaattggtgttgtagtatggatagaattattgttttgtgtgtgtttgagattgtt

SEQ ID NO: 5899 - DNA, 120 bp, synthetic construct
  source 1..120: mol_type = other DNA
aaaactacctcaaaaataaataaattctctatcattaaaaatattcaaaaataaacactaataattaatattataatataaataaaaccattattttatatatatttaaaattattaaat

SEQ ID NO: 5900 - DNA, 120 bp, synthetic construct
  source 1..120: mol_type = other DNA
aaagttattttagagataaatgagttttttgttattggaggtatttaagaataagtattaataattggtgttgtagtatggatagaattattgttttgtgtgtgtttgagattgttgaat

SEQ ID NO: 5901 - DNA, 120 bp, synthetic construct; identical to SEQ ID NO: 5897
  source 1..120: mol_type = other DNA

SEQ ID NO: 5902 - DNA, 120 bp, synthetic construct; identical to SEQ ID NO: 5898
  source 1..120: mol_type = other DNA

SEQ ID NO: 5903 - DNA, 120 bp, synthetic construct; identical to SEQ ID NO: 5899
  source 1..120: mol_type = other DNA

SEQ ID NO: 5904 - DNA, 120 bp, synthetic construct; identical to SEQ ID NO: 5900
  source 1..120: mol_type = other DNA

SEQ ID NO: 5905 - DNA, 120 bp, synthetic construct
  source 1..120: mol_type = other DNA
catctaatatcattatctttaaaattaaaaaatatactatcaacaaacccctttctaaaacacacaacccaccaacaaaataacaatatttattatctatcctaccctttcaaaaactaa

SEQ ID NO: 5906 - DNA, 120 bp, synthetic construct
  source 1..120: mol_type = other DNA
tatttggtgttgttatttttagagttagaggatgtgttgttagtagatttttttttgaaatatatagtttattagtgagatagtaatgtttattgtttgttttgtttttttagggattga

SEQ ID NO: 5907 - DNA, 120 bp, synthetic construct
  source 1..120: mol_type = other DNA
taatatcattatctttaaaattaaaaaatatactatcaacaaacccctttctaaaacacctaactacacaacccaccaacaaaataacaatatttattatctatcctaccctttcaaaaa

SEQ ID NO: 5908 - DNA, 120 bp, synthetic construct
  source 1..120: mol_type = other DNA
tggtgttgttatttttagagttagaggatgtgttgttagtagatttttttttgaaatatttgattatatagtttattagtgagatagtaatgtttattgtttgttttgtttttttaggga

SEQ ID NO: 5909 - DNA, 120 bp, synthetic construct
  source 1..120: mol_type = other DNA
catctaatatcgttatctttaaaattaaaaaatatactatcaacaaacccctttctaaaacacacaacccaccaacgaaataacaatatttattatctatcctaccctttcaaaaactaa

SEQ ID NO: 5910 - DNA, 120 bp, synthetic construct
  source 1..120: mol_type = other DNA
tatttggtgtcgttatttttagagttagaggatgtgttgttagtagatttttttttgaaatatatagtttattagcgagatagtaatgtttattgtttgttttgtttttttagggattga

SEQ ID NO: 5911 - DNA, 120 bp, synthetic construct
  source 1..120: mol_type = other DNA
taatatcgttatctttaaaattaaaaaatatactatcaacaaacccctttctaaaacacctaactacacaacccaccaacgaaataacaatatttattatctatcctaccctttcaaaaa

SEQ ID NO: 5912 - DNA, 120 bp, synthetic construct
  source 1..120: mol_type = other DNA
tggtgtcgttatttttagagttagaggatgtgttgttagtagatttttttttgaaatatttgattatatagtttattagcgagatagtaatgtttattgtttgttttgtttttttaggga

SEQ ID NO: 5913 - DNA, 120 bp, synthetic construct
  source 1..120: mol_type = other DNA
aactcaattttttctttaacaaaattaatatcattttcaaataaaataaaaaaacatatattcttcaattttaatataaaaaaaaaaaacattttatttttctataaaactaaataacaa

SEQ ID NO: 5914 - DNA, 120 bp, synthetic construct
  source 1..120: mol_type = other DNA
agtttagttttttttttaatagaattggtattatttttaagtagagtaagaaggtatatgttttttagttttaatgtggaaaagaaaagtgttttatttttttgtgaagttagatgatag

SEQ ID NO: 5915 - DNA, 120 bp, synthetic construct
  source 1..120: mol_type = other DNA
aattttttctttaacaaaattaatatcattttcaaataaaataaaaaaacatatattctacaatatcttcaattttaatataaaaaaaaaaaacattttatttttctataaaactaaata

SEQ ID NO: 5916 - DNA, 120 bp, synthetic construct
  source 1..120: mol_type = other DNA
agttttttttttaatagaattggtattatttttaagtagagtaagaaggtatatgttttataatatttttagttttaatgtggaaaagaaaagtgttttatttttttgtgaagttagatg

SEQ ID NO: 5917 - DNA, 120 bp, synthetic construct
  source 1..120: mol_type = other DNA
aactcaattttttctttaacaaaattaatatcattttcaaataaaataaaaaaacatatattcttcaattttaatataaaaaaaaaaaacgttttatttttctataaaactaaataacaa

SEQ ID NO: 5918 - DNA, 120 bp, synthetic construct
  source 1..120: mol_type = other DNA
agtttagttttttttttaatagaattggtattatttttaagtagagtaagaaggtatatgttttttagttttaatgtggaaaagaaaagcgttttatttttttgtgaagttagatgatag

SEQ ID NO: 5919 - DNA, 120 bp, synthetic construct
  source 1..120: mol_type = other DNA
aattttttctttaacaaaattaatatcattttcaaataaaataaaaaaacatatattctacaatatcttcaattttaatataaaaaaaaaaaacgttttatttttctataaaactaaata

SEQ ID NO: 5920 - DNA, 120 bp, synthetic construct
  source 1..120: mol_type = other DNA
agttttttttttaatagaattggtattatttttaagtagagtaagaaggtatatgttttataatatttttagttttaatgtggaaaagaaaagcgttttatttttttgtgaagttagatg

SEQ ID NO: 5921 - DNA, 120 bp, synthetic construct
  source 1..120: mol_type = other DNA
tccataaattatttaaaatattcctacctacaaaaaaaatccaaaaaataaaaccataatatcaaattcattctccaatattaataatttaacttcaaacaaataactttaaaaaaccta

SEQ ID NO: 5922 - DNA, 120 bp, synthetic construct
  source 1..120: mol_type = other DNA
tttataaattgtttgaaatatttttgtttgtagaaaagatttagaagataaagttatgatattaagtttattttttaatattaatagtttaattttaggtaaatgattttaggaagtttg

SEQ ID NO: 5923 - DNA, 120 bp, synthetic construct
  source 1..120: mol_type = other DNA
taaattatttaaaatattcctacctacaaaaaaaatccaaaaaataaaaccataatatcccaattcaaattcattctccaatattaataatttaacttcaaacaaataactttaaaaaac

SEQ ID NO: 5924 - DNA, 120 bp, synthetic construct
  source 1..120: mol_type = other DNA
taaattgtttgaaatatttttgtttgtagaaaagatttagaagataaagttatgatattttggtttaagtttattttttaatattaatagtttaattttaggtaaatgattttaggaagt

SEQ ID NO: 5925 - DNA, 120 bp, synthetic construct; identical to SEQ ID NO: 5921
  source 1..120: mol_type = other DNA

SEQ ID NO: 5926 - DNA, 120 bp, synthetic construct; identical to SEQ ID NO: 5922
  source 1..120: mol_type = other DNA

SEQ ID NO: 5927 - DNA, 120 bp, synthetic construct
  source 1..120: mol_type = other DNA
taaattatttaaaatattcctacctacaaaaaaaatccaaaaaataaaaccataatatcccgattcaaattcattctccaatattaataatttaacttcaaacaaataactttaaaaaac

SEQ ID NO: 5928 - DNA, 120 bp, synthetic construct
  source 1..120: mol_type = other DNA
taaattgtttgaaatatttttgtttgtagaaaagatttagaagataaagttatgatatttcggtttaagtttattttttaatattaatagtttaattttaggtaaatgattttaggaagt

SEQ ID NO: 5929 - DNA, 120 bp, synthetic construct
  source 1..120: mol_type = other DNA
aaaataaaatcatactataccaattactctacaacctactatttttatttaacattatatcttcttccattactataaacacaaactcatatcatcattttaataactacatatatttcc

SEQ ID NO: 5930 - DNA, 120 bp, synthetic construct
  source 1..120: mol_type = other DNA
gagatgggattatattatattaattattttgtaatttgttgtttttatttaatattatatttttttttattattgtaaatataaatttatgttattattttaatagttgtatatattttt

SEQ ID NO: 5931 - DNA, 120 bp, synthetic construct
  source 1..120: mol_type = other DNA
taaaatcatactataccaattactctacaacctactatttttatttaacattatatcatcaaaattcttccattactataaacacaaactcatatcatcattttaataactacatatatt

SEQ ID NO: 5932 - DNA, 120 bp, synthetic construct
  source 1..120: mol_type = other DNA
tgggattatattatattaattattttgtaatttgttgtttttatttaatattatattattaaggtttttttattattgtaaatataaatttatgttattattttaatagttgtatatatt

SEQ ID NO: 5933 - DNA, 120 bp, synthetic construct; identical to SEQ ID NO: 5929
  source 1..120: mol_type = other DNA

SEQ ID NO: 5934 - DNA, 120 bp, synthetic construct; identical to SEQ ID NO: 5930
  source 1..120: mol_type = other DNA

SEQ ID NO: 5935 - DNA, 120 bp, synthetic construct; identical to SEQ ID NO: 5931
  source 1..120: mol_type = other DNA

SEQ ID NO: 5936 - DNA, 120 bp, synthetic construct; identical to SEQ ID NO: 5932
  source 1..120: mol_type = other DNA

SEQ ID NO: 5937 - DNA, 120 bp, synthetic construct
  source 1..120: mol_type = other DNA
aacattcaaactctacttcccacacatatttaacttaaaaaattctaaaatctccatcaaaacacctaacttacataaaaaaaccatcctaaataaaataaaaacacaataaaattacat

SEQ ID NO: 5938 - DNA, 120 bp, synthetic construct
  source 1..120: mol_type = other DNA
ggtgtttagattttgttttttatatgtgtttggtttggaaggttttgaaatttttattggggtatttgatttgtatgggaaaattgttttgggtgaggtgagggtatggtgaggttgtat

SEQ ID NO: 5939 - DNA, 120 bp, synthetic construct
  source 1..120: mol_type = other DNA
tcaaactctacttcccacacatatttaacttaaaaaattctaaaatctccatcaaaacaaataactacacctaacttacataaaaaaaccatcctaaataaaataaaaacacaataaaat

SEQ ID NO: 5940 - DNA, 120 bp, synthetic construct
  source 1..120: mol_type = other DNA
ttagattttgttttttatatgtgtttggtttggaaggttttgaaatttttattggggtaagtggttgtatttgatttgtatgggaaaattgttttgggtgaggtgagggtatggtgaggt

SEQ ID NO: 5941 - DNA, 120 bp, synthetic construct
  source 1..120: mol_type = other DNA
aacgttcaaactctacttcccacacgtatttaacttaaaaaattctaaaatctccatcgaaacacctaacttacataaaaaaaccgtcctaaataaaataaaaacacgataaaattacat

SEQ ID NO: 5942 - DNA, 120 bp, synthetic construct
  source 1..120: mol_type = other DNA
ggcgtttagattttgttttttatacgtgtttggtttggaaggttttgaaatttttatcggggtatttgatttgtatgggaaaatcgttttgggtgaggtgagggtacggtgaggttgtat

SEQ ID NO: 5943 - DNA, 120 bp, synthetic construct
  source 1..120: mol_type = other DNA
tcaaactctacttcccacacgtatttaacttaaaaaattctaaaatctccatcgaaacaaataactacacctaacttacataaaaaaaccgtcctaaataaaataaaaacacgataaaat

SEQ ID NO: 5944 - DNA, 120 bp, synthetic construct
  source 1..120: mol_type = other DNA
ttagattttgttttttatacgtgtttggtttggaaggttttgaaatttttatcggggtaagtggttgtatttgatttgtatgggaaaatcgttttgggtgaggtgagggtacggtgaggt

SEQ ID NO: 5945 - DNA, 120 bp, synthetic construct
  source 1..120: mol_type = other DNA
taaaactaaactaaactaattttaaataaaataccccccctatatttatataatacatttaaaaccattttttataaccacttattataaattcactatcaaacttataaattactcaaa

SEQ ID NO: 5946 - DNA, 120 bp, synthetic construct
  source 1..120: mol_type = other DNA
taaaattgaattaagttaattttaggtgaagtgttttttttatatttgtataatgtatttaaaattattttttataattatttgttgtaagtttattattaaatttgtgaattatttaag

SEQ ID NO: 5947 - DNA, 120 bp, synthetic construct
  source 1..120: mol_type = other DNA
ctaaactaaactaattttaaataaaataccccccctatatttatataatacatttaaaataatttcaaaccattttttataaccacttattataaattcactatcaaacttataaattac

SEQ ID NO: 5948 - DNA, 120 bp, synthetic construct
  source 1..120: mol_type = other DNA
ttgaattaagttaattttaggtgaagtgttttttttatatttgtataatgtatttaaaatgattttaaattattttttataattatttgttgtaagtttattattaaatttgtgaattat

SEQ ID NO: 5949 - DNA, 120 bp, synthetic construct; identical to SEQ ID NO: 5945
  source 1..120: mol_type = other DNA

SEQ ID NO: 5950 - DNA, 120 bp, synthetic construct; identical to SEQ ID NO: 5946
  source 1..120: mol_type = other DNA

SEQ ID NO: 5951 - DNA, 120 bp, synthetic construct; identical to SEQ ID NO: 5947
  source 1..120: mol_type = other DNA

SEQ ID NO: 5952 - DNA, 120 bp, synthetic construct; identical to SEQ ID NO: 5948
  source 1..120: mol_type = other DNA

SEQ ID NO: 5953 - DNA, 120 bp, synthetic construct
  source 1..120: mol_type = other DNA
atttctttatctataaaataaacatataaatattacctttctcattattataaaaaacaaataaattaccatataacaccttaaaaaatatatctaactcaatattcatactcacaacta

SEQ ID NO: 5954 - DNA, 120 bp, synthetic construct
  source 1..120: mol_type = other DNA
atttttttatttgtaaaatgggtgtataaatattgttttttttattattatggggagtaaatgaattattatataatattttagggagtgtgtttggtttagtgtttgtgtttataattg

SEQ ID NO: 5955 - DNA, 120 bp, synthetic construct
  source 1..120: mol_type = other DNA
aactaatttctttatctataaaataaacatataaatattacctttctcattattataaaaataccatataacaccttaaaaaatatatctaactcaatattcatactcacaactatctat

SEQ ID NO: 5956 - DNA, 120 bp, synthetic construct
  source 1..120: mol_type = other DNA
agttaatttttttatttgtaaaatgggtgtataaatattgttttttttattattatggggatattatataatattttagggagtgtgtttggtttagtgtttgtgtttataattgtttat

SEQ ID NO: 5957 - DNA, 120 bp, synthetic construct
  source 1..120: mol_type = other DNA
atttctttatctataaaataaacgtataaatattacctttctcattattataaaaaacaaataaattaccatataacaccttaaaaaatatatctaactcaatattcgtactcacaacta

SEQ ID NO: 5958 - DNA, 120 bp, synthetic construct
  source 1..120: mol_type = other DNA
atttttttatttgtaaaatgggcgtataaatattgttttttttattattatggggagtaaatgaattattatataatattttagggagtgtgtttggtttagtgttcgtgtttataattg

SEQ ID NO: 5959 - DNA, 120 bp, synthetic construct
  source 1..120: mol_type = other DNA
aactaatttctttatctataaaataaacgtataaatattacctttctcattattataaaaataccatataacaccttaaaaaatatatctaactcaatattcgtactcacaactatctat

SEQ ID NO: 5960 - DNA, 120 bp, synthetic construct
  source 1..120: mol_type = other DNA
agttaatttttttatttgtaaaatgggcgtataaatattgttttttttattattatggggatattatataatattttagggagtgtgtttggtttagtgttcgtgtttataattgtttat

SEQ ID NO: 5961 - DNA, 120 bp, synthetic construct
  source 1..120: mol_type = other DNA
aaaatactaaaaaaaatataaaaaaaccttaatacacataataacaaacaaaaaatacaaaccaccccaaacccaaaccaaaatacacttctactaaccaaaaaaacaaataacaaaaaa

SEQ ID NO: 5962 - DNA, 120 bp, synthetic construct
  source 1..120: mol_type = other DNA
agggtgttgggaaggatgtggggaaattttggtgtgtatagtggtaagtaggggatgtggattattttaaatttaagttgagatgtatttttgttgattaggaagatgggtggtagagag

SEQ ID NO: 5963 - DNA, 120 bp, synthetic construct
  source 1..120: mol_type = other DNA
actaaaaaaaatataaaaaaaccttaatacacataataacaaacaaaaaatacaaaccacacacacccaccccaaacccaaaccaaaatacacttctactaaccaaaaaaacaaataaca

SEQ ID NO: 5964 - DNA, 120 bp, synthetic construct
  source 1..120: mol_type = other DNA
gttgggaaggatgtggggaaattttggtgtgtatagtggtaagtaggggatgtggattatatatgtttattttaaatttaagttgagatgtatttttgttgattaggaagatgggtggta

SEQ ID NO: 5965 - DNA, 120 bp, synthetic construct
  source 1..120: mol_type = other DNA
aaaatactaaaaaaaatataaaaaaaccttaatacgcataataacaaacaaaaaatacgaaccaccccaaacccaaaccgaaatacacttctactaaccaaaaaaacgaataacaaaaaa

SEQ ID NO: 5966 - DNA, 120 bp, synthetic construct
  source 1..120: mol_type = other DNA
agggtgttgggaaggatgtggggaaattttggtgcgtatagtggtaagtaggggatgcggattattttaaatttaagtcgagatgtatttttgttgattaggaagacgggtggtagagag

SEQ ID NO: 5967 - DNA, 120 bp, synthetic construct
  source 1..120: mol_type = other DNA
actaaaaaaaatataaaaaaaccttaatacgcataataacaaacaaaaaatacgaaccacacacgcccaccccaaacccaaaccgaaatacacttctactaaccaaaaaaacgaataaca

SEQ ID NO: 5968 - DNA, 120 bp, synthetic construct
  source 1..120: mol_type = other DNA
gttgggaaggatgtggggaaattttggtgcgtatagtggtaagtaggggatgcggattatatacgtttattttaaatttaagtcgagatgtatttttgttgattaggaagacgggtggta

SEQ ID NO: 5969 - DNA, 120 bp, synthetic construct
  source 1..120: mol_type = other DNA
aataaaaactataaattttttaattttattttctttattttttattctataaatatatcaataaaaataaaaaaaaataaaccccttatatatactttacccaactataataacaaataa

SEQ ID NO: 5970 - DNA, 120 bp, synthetic construct
  source 1..120: mol_type = other DNA
aataaaaattataagttttttagttttattttttttattttttgttttataaatgtattaataagagtagagagaaatgaattttttatatgtgttttatttagttatagtaataaataa

SEQ ID NO: 5971 - DNA, 120 bp, synthetic construct
  source 1..120: mol_type = other DNA
aaaactataaattttttaattttattttctttattttttattctataaatatatcaattttcccctaaaaataaaaaaaaataaaccccttatatatactttacccaactataataacaa

SEQ ID NO: 5972 - DNA, 120 bp, synthetic construct
  source 1..120: mol_type = other DNA
aaaattataagttttttagttttattttttttattttttgttttataaatgtattaatttttttttaagagtagagagaaatgaattttttatatgtgttttatttagttatagtaataa

SEQ ID NO: 5973 - DNA, 120 bp, synthetic construct; identical to SEQ ID NO: 5969
  source 1..120: mol_type = other DNA

SEQ ID NO: 5974 - DNA, 120 bp, synthetic construct; identical to SEQ ID NO: 5970
  source 1..120: mol_type = other DNA

SEQ ID NO: 5975 - DNA, 120 bp, synthetic construct; identical to SEQ ID NO: 5971
  source 1..120: mol_type = other DNA

SEQ ID NO: 5976 - DNA, 120 bp, synthetic construct; identical to SEQ ID NO: 5972
  source 1..120: mol_type = other DNA

SEQ ID NO: 5977 - DNA, 120 bp, synthetic construct
  source 1..120: mol_type = other DNA
catcccaaattacatttctaaatcaatcactcattacaaaacaaaataataaaaataaaataaacaaaaatatcacctaaaccctcaatttctcaaccaaatatttttccacttctcaca

SEQ ID NO: 5978 - DNA, 120 bp, synthetic construct
  source 1..120: mol_type = other DNA
tattttggattatatttttaagttagttatttgttgtaagataagatgatagagatggagtaaatagggatattgtttgagtttttggttttttagttaggtatttttttgttttttata

SEQ ID NO: 5979 - DNA, 120 bp, synthetic construct
  source 1..120: mol_type = other DNA
aaaaccatcccaaattacatttctaaatcaatcactcattacaaaacaaaataataaaaataaaatatcacctaaaccctcaatttctcaaccaaatatttttccacttctcacaacaca

SEQ ID NO: 5980 - DNA, 120 bp, synthetic construct
  source 1..120: mol_type = other DNA
aagattattttggattatatttttaagttagttatttgttgtaagataagatgatagagatgggatattgtttgagtttttggttttttagttaggtatttttttgttttttatagtgta

SEQ ID NO: 5981 - DNA, 120 bp, synthetic construct
  source 1..120: mol_type = other DNA
catcccgaattacatttctaaatcaatcactcgttacaaaacaaaataataaaaataaaataaacaaaaatatcgcctaaaccctcgatttctcaaccaaatatttttccgcttctcaca

SEQ ID NO: 5982 - DNA, 120 bp, synthetic construct
  source 1..120: mol_type = other DNA
tatttcggattatatttttaagttagttattcgttgtaagataagatgatagagatggagtaaatagggatatcgtttgagttttcggttttttagttaggtattttttcgttttttata

SEQ ID NO: 5983 - DNA, 120 bp, synthetic construct
  source 1..120: mol_type = other DNA
aaaaccatcccgaattacatttctaaatcaatcactcgttacaaaacaaaataataaaaataaaatatcgcctaaaccctcgatttctcaaccaaatatttttccgcttctcacaacgca

SEQ ID NO: 5984 - DNA, 120 bp, synthetic construct
  source 1..120: mol_type = other DNA
aagattatttcggattatatttttaagttagttattcgttgtaagataagatgatagagatgggatatcgtttgagttttcggttttttagttaggtattttttcgttttttatagcgta

SEQ ID NO: 5985 - DNA, 120 bp, synthetic construct
  source 1..120: mol_type = other DNA
tatccaatataaaaacaaaaactttcaaacattaaaaaaaaaaaataaaaaaaaactaacccaaaataactcaaatacaaaaacaaaccaaataacaatataaaaataattacaataaat

SEQ ID NO: 5986 - DNA, 120 bp, synthetic construct
  source 1..120: mol_type = other DNA
tgtttagtatagaaataaaaatttttaaatattgaagaaaaaagataaaaagaaattgatttaagatgatttaaatataagaatagattagataatgatataaaaataattataataaat

SEQ ID NO: 5987 - DNA, 120 bp, synthetic construct
  source 1..120: mol_type = other DNA
tacaatatccaatataaaaacaaaaactttcaaacattaaaaaaaaaaaataaaaaaaaactaactcaaatacaaaaacaaaccaaataacaatataaaaataattacaataaatatact

SEQ ID NO: 5988 - DNA, 120 bp, synthetic construct
  source 1..120: mol_type = other DNA
tataatgtttagtatagaaataaaaatttttaaatattgaagaaaaaagataaaaagaaattgatttaaatataagaatagattagataatgatataaaaataattataataaatatgtt

SEQ ID NO: 5989 - DNA, 120 bp, synthetic construct
  source 1..120: mol_type = other DNA
tatccaatataaaaacaaaaactttcaaacattaaaaaaaaaaaataaaaaaaaactaacccaaaataactcaaatacaaaaacaaaccaaataacgatataaaaataattacaataaat

SEQ ID NO: 5990 - DNA, 120 bp, synthetic construct
  source 1..120: mol_type = other DNA
tgtttagtatagaaataaaaatttttaaatattgaagaaaaaagataaaaagaaattgatttaagatgatttaaatataagaatagattagataacgatataaaaataattataataaat

SEQ ID NO: 5991 - DNA, 120 bp, synthetic construct
  source 1..120: mol_type = other DNA
tacaatatccaatataaaaacaaaaactttcaaacattaaaaaaaaaaaataaaaaaaaactaactcaaatacaaaaacaaaccaaataacgatataaaaataattacaataaatatact

SEQ ID NO: 5992 - DNA, 120 bp, synthetic construct
  source 1..120: mol_type = other DNA
tataatgtttagtatagaaataaaaatttttaaatattgaagaaaaaagataaaaagaaattgatttaaatataagaatagattagataacgatataaaaataattataataaatatgtt

SEQ ID NO: 5993 - DNA, 120 bp, synthetic construct
  source 1..120: mol_type = other DNA
attcattcaacaacatacttctcctctccatattaaaaatacaacaataaaaaaaattaaatttaaaaaaaataactccaattttcacttctttcaacacttaaaaatttccattttctc

SEQ ID NO: 5994 - DNA, 120 bp, synthetic construct
  source 1..120: mol_type = other DNA
atttatttaatagtgtattttttttttttatgttgaggatatagtaatgagaaaaattaagtttgaaaaaggtgattttaatttttattttttttaatatttgaggatttttattttttt

SEQ ID NO: 5995 - DNA, 120 bp, synthetic construct
  source 1..120: mol_type = other DNA
ttcaacaacatacttctcctctccatattaaaaatacaacaataaaaaaaattaaatcataccaatttaaaaaaaataactccaattttcacttctttcaacacttaaaaatttccattt

SEQ ID NO: 5996 - DNA, 120 bp, synthetic construct
  source 1..120: mol_type = other DNA
tttaatagtgtattttttttttttatgttgaggatatagtaatgagaaaaattaagttatattaatttgaaaaaggtgattttaatttttattttttttaatatttgaggatttttattt

SEQ ID NO: 5997 - DNA, 120 bp, synthetic construct
  source 1..120: mol_type = other DNA
attcattcaacaacgtacttctcctctccatattaaaaatacaacaataaaaaaaattaaatttaaaaaaaataactccaattttcacttctttcaacacttaaaaatttccattttctc

SEQ ID NO: 5998 - DNA, 120 bp, synthetic construct
  source 1..120: mol_type = other DNA
atttatttaatagcgtattttttttttttatgttgaggatatagtaatgagaaaaattaagtttgaaaaaggtgattttaatttttattttttttaatatttgaggatttttattttttt

SEQ ID NO: 5999 - DNA, 120 bp, synthetic construct
  source 1..120: mol_type = other DNA
ttcaacaacgtacttctcctctccatattaaaaatacaacaataaaaaaaattaaatcataccaatttaaaaaaaataactccaattttcacttctttcaacacttaaaaatttccattt

SEQ ID NO: 6000 - DNA, 120 bp, synthetic construct
  source 1..120: mol_type = other DNA
tttaatagcgtattttttttttttatgttgaggatatagtaatgagaaaaattaagttatattaatttgaaaaaggtgattttaatttttattttttttaatatttgaggatttttattt

SEQ ID NO: 6001 - DNA, 120 bp, synthetic construct
  source 1..120: mol_type = other DNA
ttttcatactaaaatctttaattcttctaaaattaatttttatataattaatataaaaatcttttatataaaaaaccaatacttccatcatcaataataacacaaactcatctttcccta

SEQ ID NO: 6002 - DNA, 120 bp, synthetic construct
  source 1..120: mol_type = other DNA
tttttgtgttgaggtttttaatttttttggaattaatttttgtataattagtgtaggagttttttatatgaaaagttaatgtttttattattaatgatggtataagtttatttttttttg

SEQ ID NO: 6003 - DNA, 120 bp, synthetic construct
  source 1..120: mol_type = other DNA
atactaaaatctttaattcttctaaaattaatttttatataattaatataaaaatctaattataatttttatataaaaaaccaatacttccatcatcaataataacacaaactcatcttt

SEQ ID NO: 6004 - DNA, 120 bp, synthetic construct
  source 1..120: mol_type = other DNA
gtgttgaggtttttaatttttttggaattaatttttgtataattagtgtaggagtttagttatagtttttatatgaaaagttaatgtttttattattaatgatggtataagtttattttt

SEQ ID NO: 6005 - DNA, 120 bp, synthetic construct
  source 1..120: mol_type = other DNA
ttttcgtactaaaatctttaattcttctaaaattaatttttatataattaatataaaaatcttttatataaaaaaccaatacttccatcatcaataataacacaaactcatctttcccta

SEQ ID NO: 6006 - DNA, 120 bp, synthetic construct
  source 1..120: mol_type = other DNA
ttttcgtgttgaggtttttaatttttttggaattaatttttgtataattagtgtaggagttttttatatgaaaagttaatgtttttattattaatgatggtataagtttatttttttttg

SEQ ID NO: 6007 - DNA, 120 bp, synthetic construct; identical to SEQ ID NO: 6003
  source 1..120: mol_type = other DNA

SEQ ID NO: 6008 - DNA, 120 bp, synthetic construct; identical to SEQ ID NO: 6004
  source 1..120: mol_type = other DNA

SEQ ID NO: 6009 - DNA, 120 bp, synthetic construct
  source 1..120: mol_type = other DNA
aaattttataaaccaaccactacaaataataaatatctcttttacccacatattactaatcaaatataatcatataactacatttaattacaaaaaaaacaaaaaaatctaatctttcta

SEQ ID NO: 6010 - DNA, 120 bp, synthetic construct
  source 1..120: mol_type = other DNA
agattttatgggttaattattataagtaatgaatattttttttatttatatattattggttaaatgtaattatgtaattatatttaattgtagaaaagatgagaaaatttagtttttttg

SEQ ID NO: 6011 - DNA, 120 bp, synthetic construct
  source 1..120: mol_type = other DNA
tacaaattttataaaccaaccactacaaataataaatatctcttttacccacatattactaataatcatataactacatttaattacaaaaaaaacaaaaaaatctaatctttctatata

SEQ ID NO: 6012 - DNA, 120 bp, synthetic construct
  source 1..120: mol_type = other DNA
tgtagattttatgggttaattattataagtaatgaatattttttttatttatatattattggtaattatgtaattatatttaattgtagaaaagatgagaaaatttagtttttttgtgta

SEQ ID NO: 6013 - DNA, 120 bp, synthetic construct
  source 1..120: mol_type = other DNA
aaattttataaaccaaccactacaaataataaatatctcttttacccacatattactaatcaaatataatcatataactacatttaattacaaaaaaaacgaaaaaatctaatctttcta

SEQ ID NO: 6014 - DNA, 120 bp, synthetic construct
  source 1..120: mol_type = other DNA
agattttatgggttaattattataagtaatgaatattttttttatttatatattattggttaaatgtaattatgtaattatatttaattgtagaaaagacgagaaaatttagtttttttg

SEQ ID NO: 6015 - DNA, 120 bp, synthetic construct
  source 1..120: mol_type = other DNA
tacaaattttataaaccaaccactacaaataataaatatctcttttacccacatattactaataatcatataactacatttaattacaaaaaaaacgaaaaaatctaatctttctatata

SEQ ID NO: 6016 - DNA, 120 bp, synthetic construct
  source 1..120: mol_type = other DNA
tgtagattttatgggttaattattataagtaatgaatattttttttatttatatattattggtaattatgtaattatatttaattgtagaaaagacgagaaaatttagtttttttgtgta

SEQ ID NO: 6017 - DNA, 120 bp, synthetic construct
  source 1..120: mol_type = other DNA
ttaaaaaaatttaacttaaccattttatttacttctacttccttctctatcattcccattaaaacaaataataacttcctataaataatctcactcatcccacaaactcattaaatataa

SEQ ID NO: 6018 - DNA, 120 bp, synthetic construct
  source 1..120: mol_type = other DNA
ttggagggatttggtttggttattttatttatttttatttttttttttgttatttttattggaatagatgatgattttttatgaatggttttatttattttatagatttattgaatgtgg

SEQ ID NO: 6019 - DNA, 120 bp, synthetic construct
  source 1..120: mol_type = other DNA
aaaatttaacttaaccattttatttacttctacttccttctctatcattcccattaaaactaatctaaacaaataataacttcctataaataatctcactcatcccacaaactcattaaa

SEQ ID NO: 6020 - DNA, 120 bp, synthetic construct
  source 1..120: mol_type = other DNA
gggatttggtttggttattttatttatttttatttttttttttgttatttttattggagttgatttgaatagatgatgattttttatgaatggttttatttattttatagatttattgaa

SEQ ID NO: 6021 - DNA, 120 bp, synthetic construct; identical to SEQ ID NO: 6017
  source 1..120: mol_type = other DNA

SEQ ID NO: 6022 - DNA, 120 bp, synthetic construct; identical to SEQ ID NO: 6018
  source 1..120: mol_type = other DNA

SEQ ID NO: 6023 - DNA, 120 bp, synthetic construct; identical to SEQ ID NO: 6019
  source 1..120: mol_type = other DNA

SEQ ID NO: 6024 - DNA, 120 bp, synthetic construct; identical to SEQ ID NO: 6020
  source 1..120: mol_type = other DNA

SEQ ID NO: 6025 - DNA, 120 bp, synthetic construct
  source 1..120: mol_type = other DNA
attacctaaacaataaataaaaattaaaaaacatcatcctaataacaaaaaaaaaaacctaaacaaaactcattaacacaaaatatataactacttccataaaccaacaaatttccatta

SEQ ID NO: 6026 - DNA, 120 bp, synthetic construct
  source 1..120: mol_type = other DNA
gttatttagataatggatagggattgggagatattattttagtaataaaaaaaaaggtttagatagaatttattaatatagagtgtataattgtttttataagttagtaggtttttattg

SEQ ID NO: 6027 - DNA, 120 bp, synthetic construct
  source 1..120: mol_type = other DNA
cctaaacaataaataaaaattaaaaaacatcatcctaataacaaaaaaaaaaacctaaaccaaataacaaaactcattaacacaaaatatataactacttccataaaccaacaaatttcc

SEQ ID NO: 6028 - DNA, 120 bp, synthetic construct
  source 1..120: mol_type = other DNA
tttagataatggatagggattgggagatattattttagtaataaaaaaaaaggtttagattagatgatagaatttattaatatagagtgtataattgtttttataagttagtaggttttt

SEQ ID NO: 6029 - DNA, 120 bp, synthetic construct; identical to SEQ ID NO: 6025
  source 1..120: mol_type = other DNA

SEQ ID NO: 6030 - DNA, 120 bp, synthetic construct; identical to SEQ ID NO: 6026
  source 1..120: mol_type = other DNA

SEQ ID NO: 6031 - DNA, 120 bp, synthetic construct; identical to SEQ ID NO: 6027
  source 1..120: mol_type = other DNA

SEQ ID NO: 6032 - DNA, 120 bp, synthetic construct; identical to SEQ ID NO: 6028
  source 1..120: mol_type = other DNA

SEQ ID NO: 6033 - DNA, 120 bp, synthetic construct
  source 1..120: mol_type = other DNA
tatataattaataaaaactaacattatcccattttacccacaaaaaaacaaataaccaataataaaacaaaaactcaacatcccatatacccacttcctcctcaaataaacttttcacct

SEQ ID NO: 6034 - DNA, 120 bp, synthetic construct
  source 1..120: mol_type = other DNA
tgtgtggttggtagaagttggtgttattttattttatttatgaggaaataaatgattagtggtggagtgggagtttagtattttatgtgtttattttttttttgggtggattttttattt

SEQ ID NO: 6035 - DNA, 120 bp, synthetic construct
  source 1..120: mol_type = other DNA
atactatataattaataaaaactaacattatcccattttacccacaaaaaaacaaataaccaacaaaaactcaacatcccatatacccacttcctcctcaaataaacttttcacctaccc

SEQ ID NO: 6036 - DNA, 120 bp, synthetic construct
  source 1..120: mol_type = other DNA
gtgttgtgtggttggtagaagttggtgttattttattttatttatgaggaaataaatgattagtgggagtttagtattttatgtgtttattttttttttgggtggattttttatttgttt

SEQ ID NO: 6037 - DNA, 120 bp, synthetic construct
  source 1..120: mol_type = other DNA
tatataattaataaaaactaacgttatcccattttacccacgaaaaaacaaataaccaataataaaacgaaaactcaacatcccatatacccacttcctcctcgaataaacttttcacct

SEQ ID NO: 6038 - DNA, 120 bp, synthetic construct
  source 1..120: mol_type = other DNA
tgtgtggttggtagaagttggcgttattttattttatttacgaggaaataaatgattagtggtggagcgggagtttagtattttatgtgtttatttttttttcgggtggattttttattt

SEQ ID NO: 6039 - DNA, 120 bp, synthetic construct
  source 1..120: mol_type = other DNA
atactatataattaataaaaactaacgttatcccattttacccacgaaaaaacaaataaccaacgaaaactcaacatcccatatacccacttcctcctcgaataaacttttcacctaccc

SEQ ID NO: 6040 - DNA, 120 bp, synthetic construct
  source 1..120: mol_type = other DNA
gtgttgtgtggttggtagaagttggcgttattttattttatttacgaggaaataaatgattagcgggagtttagtattttatgtgtttatttttttttcgggtggattttttatttgttt

SEQ ID NO: 6041 - DNA, 120 bp, synthetic construct
  source 1..120: mol_type = other DNA
ttcataaaattaaaatctacaaaaaacaaaaaaatacaaacaacatacttccaacataaaaatatcacaaatataaaatacaaaacccaaaattaaatacacacatacaaaatcaactaa

SEQ ID NO: 6042 - DNA, 120 bp, synthetic construct
  source 1..120: mol_type = other DNA
tttatgagattgaaatttataaaaaatagagaaatgtaaatagtatgtttttagtatggaggtattatagatatagaatatagagtttagaattaaatgtatatatatagagttagttga

SEQ ID NO: 6043 - DNA, 120 bp, synthetic construct
  source 1..120: mol_type = other DNA
aaaattaaaatctacaaaaaacaaaaaaatacaaacaacatacttccaacataaaaacacccataaatatcacaaatataaaatacaaaacccaaaattaaatacacacatacaaaatca

SEQ ID NO: 6044 - DNA, 120 bp, synthetic construct
  source 1..120: mol_type = other DNA
gagattgaaatttataaaaaatagagaaatgtaaatagtatgtttttagtatggaggtatttataagtattatagatatagaatatagagtttagaattaaatgtatatatatagagtta

SEQ ID NO: 6045 - DNA, 120 bp, synthetic construct; identical to SEQ ID NO: 6041
  source 1..120: mol_type = other DNA

SEQ ID NO: 6046 - DNA, 120 bp, synthetic construct; identical to SEQ ID NO: 6042
  source 1..120: mol_type = other DNA

SEQ ID NO: 6047 - DNA, 120 bp, synthetic construct; identical to SEQ ID NO: 6043
  source 1..120: mol_type = other DNA

SEQ ID NO: 6048 - DNA, 120 bp, synthetic construct; identical to SEQ ID NO: 6044
  source 1..120: mol_type = other DNA

SEQ ID NO: 6049 - DNA, 120 bp, synthetic construct
  source 1..120: mol_type = other DNA
atcaaaacacaaccaccaaactaaacttaaaaatatactttcttcactactatacactcccaaaaccaatttcacttaataatatccttacaaaaccaaatacaataactcacacctata

SEQ ID NO: 6050 - DNA, 120 bp, synthetic construct
  source 1..120: mol_type = other DNA
attaaggtataattattaaattgaatttaaaaatgtattttttttattgttgtgtatttttagaattagttttatttaataatgtttttgtagggttaggtgtggtggtttatatttata

SEQ ID NO: 6051 - DNA, 120 bp, synthetic construct
  source 1..120: mol_type = other DNA
caaatcaaaacacaaccaccaaactaaacttaaaaatatactttcttcactactatacactccaatttcacttaataatatccttacaaaaccaaatacaataactcacacctataatac

SEQ ID NO: 6052 - DNA, 120 bp, synthetic construct
  source 1..120: mol_type = other DNA
taaattaaggtataattattaaattgaatttaaaaatgtattttttttattgttgtgtattttagttttatttaataatgtttttgtagggttaggtgtggtggtttatatttataatat

SEQ ID NO: 6053 - DNA, 120 bp, synthetic construct
  source 1..120: mol_type = other DNA
atcaaaacacaaccaccaaactaaacttaaaaatatactttcttcactactatacactcccaaaaccaatttcacttaataatatccttacaaaaccaaatacgataactcacacctata

SEQ ID NO: 6054 - DNA, 120 bp, synthetic construct
  source 1..120: mol_type = other DNA
attaaggtataattattaaattgaatttaaaaatgtattttttttattgttgtgtatttttagaattagttttatttaataatgtttttgtagggttaggtgcggtggtttatatttata

SEQ ID NO: 6055 - DNA, 120 bp, synthetic construct
  source 1..120: mol_type = other DNA
caaatcaaaacacaaccaccaaactaaacttaaaaatatactttcttcactactatacactccaatttcacttaataatatccttacaaaaccaaatacgataactcacacctataatac

SEQ ID NO: 6056 - DNA, 120 bp, synthetic construct
  source 1..120: mol_type = other DNA
taaattaaggtataattattaaattgaatttaaaaatgtattttttttattgttgtgtattttagttttatttaataatgtttttgtagggttaggtgcggtggtttatatttataatat

SEQ ID NO: 6057 - DNA, 120 bp, synthetic construct
  source 1..120: mol_type = other DNA
aataaatttaaaaaatatctaaaaaaaaaaaaaaaccctcatataaacaaataaataatactaaaaaaaaaataaatcttatctaccttaccaaatataaaacataatacccttaaatct

SEQ ID NO: 6058 - DNA, 120 bp, synthetic construct
  source 1..120: mol_type = other DNA
aataaatttagggaatgtttaaagaaagaaaaagatttttatgtaagtaaataaatgatattaaaggaaagataggttttgtttgttttattagatatgagatgtgatgtttttaagttt

SEQ ID NO: 6059 - DNA, 120 bp, synthetic construct
  source 1..120: mol_type = other DNA
aaacaataaatttaaaaaatatctaaaaaaaaaaaaaaaccctcatataaacaaataaataaaaaaaataaatcttatctaccttaccaaatataaaacataatacccttaaatctaata

SEQ ID NO: 6060 - DNA, 120 bp, synthetic construct
  source 1..120: mol_type = other DNA
aagtaataaatttagggaatgtttaaagaaagaaaaagatttttatgtaagtaaataaatgggaaagataggttttgtttgttttattagatatgagatgtgatgtttttaagtttagtg

SEQ ID NO: 6061 - DNA, 120 bp, synthetic construct
  source 1..120: mol_type = other DNA
aataaatttaaaaaatatctaaaaaaaaaaaaaaaccctcatataaacaaataaataatactaaaaaaaaaataaatcttatctaccttaccaaatataaaacgtaatacccttaaatct

SEQ ID NO: 6062 - DNA, 120 bp, synthetic construct
  source 1..120: mol_type = other DNA
aataaatttagggaatgtttaaagaaagaaaaagatttttatgtaagtaaataaatgatattaaaggaaagataggttttgtttgttttattagatatgagacgtgatgtttttaagttt

SEQ ID NO: 6063 - DNA, 120 bp, synthetic construct
  source 1..120: mol_type = other DNA
aaacaataaatttaaaaaatatctaaaaaaaaaaaaaaaccctcatataaacaaataaataaaaaaaataaatcttatctaccttaccaaatataaaacgtaatacccttaaatctaata

SEQ ID NO: 6064 - DNA, 120 bp, synthetic construct
  source 1..120: mol_type = other DNA
aagtaataaatttagggaatgtttaaagaaagaaaaagatttttatgtaagtaaataaatgggaaagataggttttgtttgttttattagatatgagacgtgatgtttttaagtttagtg

SEQ ID NO: 6065 - DNA, 120 bp, synthetic construct
  source 1..120: mol_type = other DNA
atatactccataaaataaaaaaattaatcaatccattacacaaaaactattttacccacaaattaaacaaaaacatcaaacaccaccaaatcctaaccaaccaaccaatctactccaatt

SEQ ID NO: 6066 - DNA, 120 bp, synthetic construct
  source 1..120: mol_type = other DNA
gtgtgttttgtgagataaggagattaattagtttattatgtaggggttgttttatttgtagattgaatagagatgttggatattattaggttttagttagttagttagtttgttttagtt

SEQ ID NO: 6067 - DNA, 120 bp, synthetic construct
  source 1..120: mol_type = other DNA
ctccataaaataaaaaaattaatcaatccattacacaaaaactattttacccacaaataaaaataattaaacaaaaacatcaaacaccaccaaatcctaaccaaccaaccaatctactcc

SEQ ID NO: 6068 - DNA, 120 bp, synthetic construct
  source 1..120: mol_type = other DNA
ttttgtgagataaggagattaattagtttattatgtaggggttgttttatttgtagatggaggtaattgaatagagatgttggatattattaggttttagttagttagttagtttgtttt

SEQ ID NO: 6069 - DNA, 120 bp, synthetic construct
  source 1..120: mol_type = other DNA
atatactccgtaaaataaaaaaattaatcaatccattacgcaaaaactattttacccgcaaattaaacaaaaacgtcgaacaccaccaaatcctaaccaaccaaccaatctactccaatt

SEQ ID NO: 6070 - DNA, 120 bp, synthetic construct
  source 1..120: mol_type = other DNA
gtgtgtttcgtgagataaggagattaattagtttattacgtaggggttgttttattcgtagattgaatagagacgtcggatattattaggttttagttagttagttagtttgttttagtt

SEQ ID NO: 6071 - DNA, 120 bp, synthetic construct
  source 1..120: mol_type = other DNA
ctccgtaaaataaaaaaattaatcaatccattacgcaaaaactattttacccgcaaataaaaataattaaacaaaaacgtcgaacaccaccaaatcctaaccaaccaaccaatctactcc

SEQ ID NO: 6072 - DNA, 120 bp, synthetic construct
  source 1..120: mol_type = other DNA
tttcgtgagataaggagattaattagtttattacgtaggggttgttttattcgtagatggaggtaattgaatagagacgtcggatattattaggttttagttagttagttagtttgtttt

SEQ ID NO: 6073 - DNA, 120 bp, synthetic construct
  source 1..120: mol_type = other DNA
aaaaaacctaaaatatatttcctacaatattaactactatatcctaaatatttccaatcttaaaattttctaacatccttaaacaaataaaaaatttctataaaatttctctactaacca

SEQ ID NO: 6074 - DNA, 120 bp, synthetic construct
  source 1..120: mol_type = other DNA
aaaaagtttaggatgtgttttttatagtgttaattgttgtgttttgaatgtttttaattttggaattttttagtatttttgggtagatgaagaatttttgtgggatttttttgttgatta

SEQ ID NO: 6075 - DNA, 120 bp, synthetic construct
  source 1..120: mol_type = other DNA
caccaaaaaacctaaaatatatttcctacaatattaactactatatcctaaatatttccaatttctaacatccttaaacaaataaaaaatttctataaaatttctctactaaccaaaaaa

SEQ ID NO: 6076 - DNA, 120 bp, synthetic construct
  source 1..120: mol_type = other DNA
tattaaaaagtttaggatgtgttttttatagtgttaattgttgtgttttgaatgtttttaatttttagtatttttgggtagatgaagaatttttgtgggatttttttgttgattagggga

SEQ ID NO: 6077 - DNA, 120 bp, synthetic construct; identical to SEQ ID NO: 6073
  source 1..120: mol_type = other DNA

SEQ ID NO: 6078 - DNA, 120 bp, synthetic construct; identical to SEQ ID NO: 6074
  source 1..120: mol_type = other DNA

SEQ ID NO: 6079 - DNA, 120 bp, synthetic construct; identical to SEQ ID NO: 6075
  source 1..120: mol_type = other DNA

SEQ ID NO: 6080 - DNA, 120 bp, synthetic construct; identical to SEQ ID NO: 6076
  source 1..120: mol_type = other DNA

SEQ ID NO: 6081 - DNA, 120 bp, synthetic construct
  source 1..120: mol_type = other DNA
ccaaaacaaccaatataaaatcaaacccacaaaactataaacaaaaccccacacaaaaaccaaaaaacatcatccacaaaaaattcaaacccccttaaataaaaactaaatcacaaatta

SEQ ID NO: 6082 - DNA, 120 bp, synthetic construct
  source 1..120: mol_type = other DNA
ttagaatggttagtgtgaaattagatttgtagggttgtgggtagggttttatgtagaagttgaagggtgttatttatgggaagtttagatttttttggatgagggttgagttatgagtta

SEQ ID NO: 6083 - DNA, 120 bp, synthetic construct
  source 1..120: mol_type = other DNA
acaaccaatataaaatcaaacccacaaaactataaacaaaaccccacacaaaaaccaaacccccttaaaaaacatcatccacaaaaaattcaaacccccttaaataaaaactaaatcaca

SEQ ID NO: 6084 - DNA, 120 bp, synthetic construct
  source 1..120: mol_type = other DNA
atggttagtgtgaaattagatttgtagggttgtgggtagggttttatgtagaagttgggtttttttgaagggtgttatttatgggaagtttagatttttttggatgagggttgagttatg

SEQ ID NO: 6085 - DNA, 120 bp, synthetic construct
  source 1..120: mol_type = other DNA
ccaaaacgaccaatataaaatcaaacccgcaaaactataaacaaaaccccacgcaaaaaccgaaaaacgtcatccacgaaaaattcaaacccccttaaataaaaactaaatcacgaatta

SEQ ID NO: 6086 - DNA, 120 bp, synthetic construct
  source 1..120: mol_type = other DNA
ttagaacggttagtgtgaaattagattcgtagggttgtgggtagggttttacgtagaagtcgaagggcgttatttacgggaagtttagatttttttggatgagggttgagttacgagtta

SEQ ID NO: 6087 - DNA, 120 bp, synthetic construct
  source 1..120: mol_type = other DNA
acgaccaatataaaatcaaacccgcaaaactataaacaaaaccccacgcaaaaaccgaacccccttaaaaaacgtcatccacgaaaaattcaaacccccttaaataaaaactaaatcacg

SEQ ID NO: 6088 - DNA, 120 bp, synthetic construct
  source 1..120: mol_type = other DNA
acggttagtgtgaaattagattcgtagggttgtgggtagggttttacgtagaagtcgggtttttttgaagggcgttatttacgggaagtttagatttttttggatgagggttgagttacg

SEQ ID NO: 6089 - DNA, 120 bp, synthetic construct
  source 1..120: mol_type = other DNA
ctcaaaatccaaaaaaacttactttaaccatcattaaaaccttctattttctactttactaaataaccatatacattcatactcaaaaacattaacttactcattaaaataacatcactt

SEQ ID NO: 6090 - DNA, 120 bp, synthetic construct
  source 1..120: mol_type = other DNA
tttaggatttaaaagggtttgttttgattattattaagattttttgttttttattttattaggtaattatatgtgtttatgtttagagatattaatttatttattagaataatattattt

SEQ ID NO: 6091 - DNA, 120 bp, synthetic construct
  source 1..120: mol_type = other DNA
ttctctcaaaatccaaaaaaacttactttaaccatcattaaaaccttctattttctactttaccatatacattcatactcaaaaacattaacttactcattaaaataacatcacttaacc

SEQ ID NO: 6092 - DNA, 120 bp, synthetic construct
  source 1..120: mol_type = other DNA
tttttttaggatttaaaagggtttgttttgattattattaagattttttgttttttattttattatatgtgtttatgtttagagatattaatttatttattagaataatattatttggtt

SEQ ID NO: 6093 - DNA, 120 bp, synthetic construct
  source 1..120: mol_type = other DNA
ctcaaaatccaaaaaaacttactttaaccatcattaaaaccttctattttctactttactaaataaccatatacgttcatactcaaaaacattaacttactcattaaaataacatcactt

SEQ ID NO: 6094 - DNA, 120 bp, synthetic construct
  source 1..120: mol_type = other DNA
tttaggatttaaaagggtttgttttgattattattaagattttttgttttttattttattaggtaattatatgcgtttatgtttagagatattaatttatttattagaataatattattt

SEQ ID NO: 6095 - DNA, 120 bp, synthetic construct
  source 1..120: mol_type = other DNA
ttctctcaaaatccaaaaaaacttactttaaccatcattaaaaccttctattttctactttaccatatacgttcatactcaaaaacattaacttactcattaaaataacatcacttaacc

SEQ ID NO: 6096 - DNA, 120 bp, synthetic construct
  source 1..120: mol_type = other DNA
tttttttaggatttaaaagggtttgttttgattattattaagattttttgttttttattttattatatgcgtttatgtttagagatattaatttatttattagaataatattatttggtt

SEQ ID NO: 6097 - DNA, 120 bp, synthetic construct
  source 1..120: mol_type = other DNA
aaatcatcaaaacaaatacctcctttataaatcacaataacactaatatacattaatccaacttcaactataataaaaacttccaccaaaacccaaactttctaaaccacaataaaaaaa

SEQ ID NO: 6098 - DNA, 120 bp, synthetic construct
  source 1..120: mol_type = other DNA
agattgttagagtaggtgttttttttgtggattatgataatattgatgtgtgttgatttagttttaattataatagggatttttattaaagtttagattttttggattatagtgagaaag

SEQ ID NO: 6099 - DNA, 120 bp, synthetic construct
  source 1..120: mol_type = other DNA
atcaaaacaaatacctcctttataaatcacaataacactaatatacattaatccaaccatcaacatcttcaactataataaaaacttccaccaaaacccaaactttctaaaccacaataa

SEQ ID NO: 6100 - DNA, 120 bp, synthetic construct
  source 1..120: mol_type = other DNA
gttagagtaggtgttttttttgtggattatgataatattgatgtgtgttgatttagttattagtatttttaattataatagggatttttattaaagtttagattttttggattatagtga

SEQ ID NO: 6101 - DNA, 120 bp, synthetic construct
  source 1..120: mol_type = other DNA
aaatcgtcaaaacaaatacctcctttataaatcacgataacactaatatacgttaatccaacttcaactataataaaaacttccaccaaaacccaaactttctaaaccacaataaaaaaa

SEQ ID NO: 6102 - DNA, 120 bp, synthetic construct
  source 1..120: mol_type = other DNA
agatcgttagagtaggtgttttttttgtggattacgataatattgatgtgcgttgatttagttttaattataatagggatttttattaaagtttagattttttggattatagtgagaaag

SEQ ID NO: 6103 - DNA, 120 bp, synthetic construct
  source 1..120: mol_type = other DNA
atcaaaacaaatacctcctttataaatcacgataacactaatatacgttaatccaaccatcaacatcttcaactataataaaaacttccaccaaaacccaaactttctaaaccacaataa

SEQ ID NO: 6104 - DNA, 120 bp, synthetic construct
  source 1..120: mol_type = other DNA
gttagagtaggtgttttttttgtggattacgataatattgatgtgcgttgatttagttattagtatttttaattataatagggatttttattaaagtttagattttttggattatagtga

SEQ ID NO: 6105 - DNA, 120 bp, synthetic construct
  source 1..120: mol_type = other DNA
tctaccatcataataatttacctaatttccaaaaaaaaaataattccactctatacacctataaccaaaaaaattaatcaacactaaaataatcaacctaccaaataaatatcaaatcaa

SEQ ID NO: 6106 - DNA, 120 bp, synthetic construct
  source 1..120: mol_type = other DNA
tttgttattatagtaatttgtttagtttttaggaaggaggtaattttattttatatatttgtggttgggaggattagttaatattgaagtgattaatttattaagtaagtgttaagttaa

SEQ ID NO: 6107 - DNA, 120 bp, synthetic construct
  source 1..120: mol_type = other DNA
taatctaccatcataataatttacctaatttccaaaaaaaaaataattccactctatacacccaaaaaaattaatcaacactaaaataatcaacctaccaaataaatatcaaatcaataa

SEQ ID NO: 6108 - DNA, 120 bp, synthetic construct
  source 1..120: mol_type = other DNA
tgatttgttattatagtaatttgtttagtttttaggaaggaggtaattttattttatatatttgggaggattagttaatattgaagtgattaatttattaagtaagtgttaagttaatga

SEQ ID NO: 6109 - DNA, 120 bp, synthetic construct
  source 1..120: mol_type = other DNA
tctaccatcataataatttacctaatttccaaaaaaaaaataattccactctatacacctataaccgaaaaaattaatcaacactaaaataatcaacctaccaaataaatatcaaatcaa

SEQ ID NO: 6110 - DNA, 120 bp, synthetic construct
  source 1..120: mol_type = other DNA
tttgttattatagtaatttgtttagtttttaggaaggaggtaattttattttatatatttgtggtcgggaggattagttaatattgaagtgattaatttattaagtaagtgttaagttaa

SEQ ID NO: 6111 - DNA, 120 bp, synthetic construct
  source 1..120: mol_type = other DNA
taatctaccatcataataatttacctaatttccaaaaaaaaaataattccactctatacacccgaaaaaattaatcaacactaaaataatcaacctaccaaataaatatcaaatcaataa

SEQ ID NO: 6112 - DNA, 120 bp, synthetic construct
  source 1..120: mol_type = other DNA
tgatttgttattatagtaatttgtttagtttttaggaaggaggtaattttattttatatattcgggaggattagttaatattgaagtgattaatttattaagtaagtgttaagttaatga

SEQ ID NO: 6113 - DNA, 120 bp, synthetic construct
  source 1..120: mol_type = other DNA
acattttacacacccaccctcaaataaaattaaaatatactaaactttctctaataatataaatacataaacaccatataaaatataccactttctcatacttatttaacttcaaaaacc

SEQ ID NO: 6114 - DNA, 120 bp, synthetic construct
  source 1..120: mol_type = other DNA
atattttgtatatttatttttaggtaaggttgaggtgtattgaattttttttaataatatgaatatataaatattatatagaatgtgttatttttttatatttatttaattttaaaagtt

SEQ ID NO: 6115 - DNA, 120 bp, synthetic construct
  source 1..120: mol_type = other DNA
aataaacattttacacacccaccctcaaataaaattaaaatatactaaactttctctaataataaacaccatataaaatataccactttctcatacttatttaacttcaaaaaccctaaa

SEQ ID NO: 6116 - DNA, 120 bp, synthetic construct
  source 1..120: mol_type = other DNA
ggtgaatattttgtatatttatttttaggtaaggttgaggtgtattgaattttttttaataataaatattatatagaatgtgttatttttttatatttatttaattttaaaagttttggg

SEQ ID NO: 6117 - DNA, 120 bp, synthetic construct; identical to SEQ ID NO: 6113
  source 1..120: mol_type = other DNA

SEQ ID NO: 6118 - DNA, 120 bp, synthetic construct; identical to SEQ ID NO: 6114
  source 1..120: mol_type = other DNA

SEQ ID NO: 6119 - DNA, 120 bp, synthetic construct; identical to SEQ ID NO: 6115
  source 1..120: mol_type = other DNA

SEQ ID NO: 6120 - DNA, 120 bp, synthetic construct; identical to SEQ ID NO: 6116
  source 1..120: mol_type = other DNA

SEQ ID NO: 6121 - DNA, 120 bp, synthetic construct
  source 1..120: mol_type = other DNA
acaatttattaaacacataatacttaatacaaaccaatccctacactaaaataatcttcccacaactaatataactctctacacccttcaaatctcaacttaaacaataactcctcaaaa

SEQ ID NO: 6122 - DNA, 120 bp, synthetic construct
  source 1..120: mol_type = other DNA
gtagtttattaagtatataatgtttggtgtaggttagtttttatgttagaatggtttttttatggttggtgtggttttttatattttttaggttttagtttaagtaataattttttaaga

SEQ ID NO: 6123 - DNA, 120 bp, synthetic construct
  source 1..120: mol_type = other DNA
atttattaaacacataatacttaatacaaaccaatccctacactaaaataatcttcccatcataacaactaatataactctctacacccttcaaatctcaacttaaacaataactcctca

SEQ ID NO: 6124 - DNA, 120 bp, synthetic construct
  source 1..120: mol_type = other DNA
gtttattaagtatataatgtttggtgtaggttagtttttatgttagaatggtttttttattataatggttggtgtggttttttatattttttaggttttagtttaagtaataatttttta

SEQ ID NO: 6125 - DNA, 120 bp, synthetic construct
  source 1..120: mol_type = other DNA
acaatttattaaacacataatacttaatacaaaccaatccctacgctaaaataatcttcccacgactaatataactctctacacccttcaaatctcaacttaaacaataactcctcaaaa

SEQ ID NO: 6126 - DNA, 120 bp, synthetic construct
  source 1..120: mol_type = other DNA
gtagtttattaagtatataatgtttggtgtaggttagtttttacgttagaatggtttttttacggttggtgtggttttttatattttttaggttttagtttaagtaataattttttaaga

SEQ ID NO: 6127 - DNA, 120 bp, synthetic construct
  source 1..120: mol_type = other DNA
atttattaaacacataatacttaatacaaaccaatccctacgctaaaataatcttcccatcataacgactaatataactctctacacccttcaaatctcaacttaaacaataactcctca

SEQ ID NO: 6128 - DNA, 120 bp, synthetic construct
  source 1..120: mol_type = other DNA
gtttattaagtatataatgtttggtgtaggttagtttttacgttagaatggtttttttattataacggttggtgtggttttttatattttttaggttttagtttaagtaataatttttta

SEQ ID NO: 6129 - DNA, 120 bp, synthetic construct
  source 1..120: mol_type = other DNA
tatttaaatcatacatatttttaccttataaaaaaattacacttcttataactaatataaactaatctcctatttcatatttacccttctaatttcattttacaacataccaaactaata

SEQ ID NO: 6130 - DNA, 120 bp, synthetic construct
  source 1..120: mol_type = other DNA
tatttaaattatgtatgtttttgttttataaagaagttatattttttgtaattagtatgaattagttttttattttatgtttgtttttttagttttattttataatatattaagttaata

SEQ ID NO: 6131 - DNA, 120 bp, synthetic construct
  source 1..120: mol_type = other DNA
taaatcatacatatttttaccttataaaaaaattacacttcttataactaatataaacaaaaactctaatctcctatttcatatttacccttctaatttcattttacaacataccaaact

SEQ ID NO: 6132 - DNA, 120 bp, synthetic construct
  source 1..120: mol_type = other DNA
taaattatgtatgtttttgttttataaagaagttatattttttgtaattagtatgaatagaaattttagttttttattttatgtttgtttttttagttttattttataatatattaagtt

SEQ ID NO: 6133 - DNA, 120 bp, synthetic construct; identical to SEQ ID NO: 6129
  source 1..120: mol_type = other DNA

SEQ ID NO: 6134 - DNA, 120 bp, synthetic construct; identical to SEQ ID NO: 6130
  source 1..120: mol_type = other DNA

SEQ ID NO: 6135 - DNA, 120 bp, synthetic construct; identical to SEQ ID NO: 6131
  source 1..120: mol_type = other DNA

SEQ ID NO: 6136 - DNA, 120 bp, synthetic construct; identical to SEQ ID NO: 6132
  source 1..120: mol_type = other DNA

SEQ ID NO: 6137 - DNA, 120 bp, synthetic construct
  source 1..120: mol_type = other DNA
aacaataccctaaaatactaaataatattcacacaaccaaccaaaatcaaaactcaaacaaaaccaacattctataccctcactttctcccaaaactaaatacaccaactcctaaaactt

SEQ ID NO: 6138 - DNA, 120 bp, synthetic construct
  source 1..120: mol_type = other DNA
aataatgttttagggtgttaggtggtgtttatatggttagttagagttaaaatttagatggggttagtgttttatgtttttatttttttttaaagttgagtgtattagtttttaaaattt

SEQ ID NO: 6139 - DNA, 120 bp, synthetic construct
  source 1..120: mol_type = other DNA
taccctaaaatactaaataatattcacacaaccaaccaaaatcaaaactcaaacaaaacccctaaaaccaacattctataccctcactttctcccaaaactaaatacaccaactcctaaa

SEQ ID NO: 6140 - DNA, 120 bp, synthetic construct
  source 1..120: mol_type = other DNA
tgttttagggtgttaggtggtgtttatatggttagttagagttaaaatttagatggggtttttgaggttagtgttttatgtttttatttttttttaaagttgagtgtattagtttttaaa

SEQ ID NO: 6141 - DNA, 120 bp, synthetic construct
  source 1..120: mol_type = other DNA
aacaataccctaaaatactaaataatattcacacgaccaaccaaaatcaaaactcaaacgaaaccaacgttctataccctcactttctcccaaaactaaatacaccaactcctaaaactt

SEQ ID NO: 6142 - DNA, 120 bp, synthetic construct
  source 1..120: mol_type = other DNA
aataatgttttagggtgttaggtggtgtttatacggttagttagagttaaaatttagacggggttagcgttttatgtttttatttttttttaaagttgagtgtattagtttttaaaattt

SEQ ID NO: 6143 - DNA, 120 bp, synthetic construct
  source 1..120: mol_type = other DNA
taccctaaaatactaaataatattcacacgaccaaccaaaatcaaaactcaaacgaaacccctaaaaccaacgttctataccctcactttctcccaaaactaaatacaccaactcctaaa

SEQ ID NO: 6144 - DNA, 120 bp, synthetic construct
  source 1..120: mol_type = other DNA
tgttttagggtgttaggtggtgtttatacggttagttagagttaaaatttagacggggtttttgaggttagcgttttatgtttttatttttttttaaagttgagtgtattagtttttaaa

SEQ ID NO: 6145 - DNA, 120 bp, synthetic construct
  source 1..120: mol_type = other DNA
atataaaaaataaactaaatatctaacatacatataaactttctacttcttccacttatatctattaaatatatttacacttaataaatattttacaatataaatataaaaatccacaaa

SEQ ID NO: 6146 - DNA, 120 bp, synthetic construct
  source 1..120: mol_type = other DNA
atgtaagggataaattggatatttaatatatatgtgaattttttattttttttatttatgtttattaagtgtatttgtatttgatagatattttataatgtgggtataaaaatttatagg

SEQ ID NO: 6147 - DNA, 120 bp, synthetic construct
  source 1..120: mol_type = other DNA
aaaaataaactaaatatctaacatacatataaactttctacttcttccacttatatctattaaaactattaaatatatttacacttaataaatattttacaatataaatataaaaatcca

SEQ ID NO: 6148 - DNA, 120 bp, synthetic construct
  source 1..120: mol_type = other DNA
agggataaattggatatttaatatatatgtgaattttttattttttttatttatgtttattagaattattaagtgtatttgtatttgatagatattttataatgtgggtataaaaattta

SEQ ID NO: 6149 - DNA, 120 bp, synthetic construct; identical to SEQ ID NO: 6145
  source 1..120: mol_type = other DNA

SEQ ID NO: 6150 - DNA, 120 bp, synthetic construct; identical to SEQ ID NO: 6146
  source 1..120: mol_type = other DNA

SEQ ID NO: 6151 - DNA, 120 bp, synthetic construct; identical to SEQ ID NO: 6147
  source 1..120: mol_type = other DNA

SEQ ID NO: 6152 - DNA, 120 bp, synthetic construct; identical to SEQ ID NO: 6148
  source 1..120: mol_type = other DNA

SEQ ID NO: 6153 - DNA, 120 bp, synthetic construct
  source 1..120: mol_type = other DNA
aaataaaattaaaaaacataaatcataaaataaaaaaataaaataaatattataaaatttcatttcaaaaaaaataaattaaaaacataattttttaatattttatttattttaaacaaa

SEQ ID NO: 6154 - DNA, 120 bp, synthetic construct
  source 1..120: mol_type = other DNA
aggtgaagttaagagatatggattatagagtgagaaggtaaaataaatgttatggagttttattttaaaaaaggtaaattaaggatatggttttttgatgttttatttgttttgaataaa

SEQ ID NO: 6155 - DNA, 120 bp, synthetic construct
  source 1..120: mol_type = other DNA
aaattaaaaaacataaatcataaaataaaaaaataaaataaatattataaaatttctaaaaaaaatatttcaaaaaaaataaattaaaaacataattttttaatattttatttattttaa

SEQ ID NO: 6156 - DNA, 120 bp, synthetic construct
  source 1..120: mol_type = other DNA
aagttaagagatatggattatagagtgagaaggtaaaataaatgttatggagtttttaagaaagatattttaaaaaaggtaaattaaggatatggttttttgatgttttatttgttttga

SEQ ID NO: 6157 - DNA, 120 bp, synthetic construct; identical to SEQ ID NO: 6153
  source 1..120: mol_type = other DNA

SEQ ID NO: 6158 - DNA, 120 bp, synthetic construct; identical to SEQ ID NO: 6154
  source 1..120: mol_type = other DNA

SEQ ID NO: 6159 - DNA, 120 bp, synthetic construct; identical to SEQ ID NO: 6155
  source 1..120: mol_type = other DNA

SEQ ID NO: 6160 - DNA, 120 bp, synthetic construct; identical to SEQ ID NO: 6156
  source 1..120: mol_type = other DNA

SEQ ID NO: 6161 - DNA, 120 bp, synthetic construct
  source 1..120: mol_type = other DNA
tcacaaatcattcccacaataacatttaatcaaaccaatcaaccaaataataaaaaataaaccaattattcttaaaattataactaataaatctctaaattaacctctactttcctcata

SEQ ID NO: 6162 - DNA, 120 bp, synthetic construct
  source 1..120: mol_type = other DNA
ttatgaattatttttatagtaatgtttggttaaattaattaattaagtaatgaaaaatgaattggttgtttttgaggttgtgattaatagatttttaagttagtttttattttttttatg

SEQ ID NO: 6163 - DNA, 120 bp, synthetic construct
  source 1..120: mol_type = other DNA
taattcacaaatcattcccacaataacatttaatcaaaccaatcaaccaaataataaaaaatattcttaaaattataactaataaatctctaaattaacctctactttcctcatactctt

SEQ ID NO: 6164 - DNA, 120 bp, synthetic construct
  source 1..120: mol_type = other DNA
tagtttatgaattatttttatagtaatgtttggttaaattaattaattaagtaatgaaaaatgtttttgaggttgtgattaatagatttttaagttagtttttattttttttatgttttt

SEQ ID NO: 6165 - DNA, 120 bp, synthetic construct
  source 1..120: mol_type = other DNA
tcacgaatcattcccacaataacgtttaatcaaaccaatcaaccaaataataaaaaataaaccgattattcttaaaattataactaataaatctctaaattaacctctactttcctcata

SEQ ID NO: 6166 - DNA, 120 bp, synthetic construct
  source 1..120: mol_type = other DNA
ttacgaattatttttatagtaacgtttggttaaattaattaattaagtaatgaaaaatgaatcggttgtttttgaggttgtgattaatagatttttaagttagtttttattttttttatg

SEQ ID NO: 6167 - DNA, 120 bp, synthetic construct
  source 1..120: mol_type = other DNA
taattcacgaatcattcccacaataacgtttaatcaaaccaatcaaccaaataataaaaaatattcttaaaattataactaataaatctctaaattaacctctactttcctcatactctt

SEQ ID NO: 6168 - DNA, 120 bp, synthetic construct
  source 1..120: mol_type = other DNA
tagtttacgaattatttttatagtaacgtttggttaaattaattaattaagtaatgaaaaatgtttttgaggttgtgattaatagatttttaagttagtttttattttttttatgttttt

SEQ ID NO: 6169 - DNA, 120 bp, synthetic construct
  source 1..120: mol_type = other DNA
acaaaaaaaaataaaaaaaaaaaaaaaaataatctcaaactaattaaatttctaatttaaataactactactactacttataaaaaactctatttaaaaaaaaatatttttctatcactt

SEQ ID NO: 6170 - DNA, 120 bp, synthetic construct
  source 1..120: mol_type = other DNA
gtagaagagaatgaagaaggaaaaggaggtagttttaggttggttaggtttttgatttagatagttgttgttattatttatgagaaattttgtttgagagaaaatgtttttttgttattt

SEQ ID NO: 6171 - DNA, 120 bp, synthetic construct
  source 1..120: mol_type = other DNA
aaaaaataaaaaaaaaaaaaaaaataatctcaaactaattaaatttctaatttaaaacttccaaaataactactactactacttataaaaaactctatttaaaaaaaaatatttttctat

SEQ ID NO: 6172 - DNA, 120 bp, synthetic construct
  source 1..120: mol_type = other DNA
agagaatgaagaaggaaaaggaggtagttttaggttggttaggtttttgatttagaatttttaaggtagttgttgttattatttatgagaaattttgtttgagagaaaatgtttttttgt

SEQ ID NO: 6173 - DNA, 120 bp, synthetic construct; identical to SEQ ID NO: 6169
  source 1..120: mol_type = other DNA

SEQ ID NO: 6174 - DNA, 120 bp, synthetic construct; identical to SEQ ID NO: 6170
  source 1..120: mol_type = other DNA

SEQ ID NO: 6175 - DNA, 120 bp, synthetic construct; identical to SEQ ID NO: 6171
  source 1..120: mol_type = other DNA

SEQ ID NO: 6176 - DNA, 120 bp, synthetic construct; identical to SEQ ID NO: 6172
  source 1..120: mol_type = other DNA

SEQ ID NO: 6177 - DNA, 120 bp, synthetic construct
  source 1..120: mol_type = other DNA
aaaaatcaaaacataacttaactaaaacatcaattcaatctttccaaaaattacaatccaaaatacctacaaaatcttcattttcacttaaaactaaaaaccctcattcaaatttcttta

SEQ ID NO: 6178 - DNA, 120 bp, synthetic construct
  source 1..120: mol_type = other DNA
gagagttaaggtatggtttagttggaatattggtttagtttttttaagggttgtaatttaagatgtttataaagtttttatttttatttgaagttaagggtttttgtttaagttttttta

SEQ ID NO: 6179 - DNA, 120 bp, synthetic construct
  source 1..120: mol_type = other DNA
tactaaaaatcaaaacataacttaactaaaacatcaattcaatctttccaaaaattacaatcctacaaaatcttcattttcacttaaaactaaaaaccctcattcaaatttctttaaatt

SEQ ID NO: 6180 - DNA, 120 bp, synthetic construct
  source 1..120: mol_type = other DNA
tgttgagagttaaggtatggtttagttggaatattggtttagtttttttaagggttgtaattttataaagtttttatttttatttgaagttaagggtttttgtttaagtttttttagatt

SEQ ID NO: 6181 - DNA, 120 bp, synthetic construct
  source 1..120: mol_type = other DNA
aaaaatcaaaacataacttaactaaaacatcgattcaatctttccaaaaattacaatccaaaatacctacaaaatcttcattttcacttaaaactaaaaaccctcgttcaaatttcttta

SEQ ID NO: 6182 - DNA, 120 bp, synthetic construct
  source 1..120: mol_type = other DNA
gagagttaaggtatggtttagttggaatatcggtttagtttttttaagggttgtaatttaagatgtttataaagtttttatttttatttgaagttaagggttttcgtttaagttttttta

SEQ ID NO: 6183 - DNA, 120 bp, synthetic construct
  source 1..120: mol_type = other DNA
tactaaaaatcaaaacataacttaactaaaacatcgattcaatctttccaaaaattacaatcctacaaaatcttcattttcacttaaaactaaaaaccctcgttcaaatttctttaaatt

SEQ ID NO: 6184 - DNA, 120 bp, synthetic construct
  source 1..120: mol_type = other DNA
tgttgagagttaaggtatggtttagttggaatatcggtttagtttttttaagggttgtaattttataaagtttttatttttatttgaagttaagggttttcgtttaagtttttttagatt

SEQ ID NO: 6185 - DNA, 120 bp, synthetic construct
  source 1..120: mol_type = other DNA
taacctctttaaaaactaccattttctaccaaaacaaaaacaaaaacaaaacaaaacaaaaaaaaattttacataaccaaattacctaaaatcaactaatatactaatacattaaacaat

SEQ ID NO: 6186 - DNA, 120 bp, synthetic construct
  source 1..120: mol_type = other DNA
taatttttttaaaagttgttattttttattaaaataaaaataaaaataaaataaaataaaaaagagttttgtatgattaaattgtttgaggttagttggtatgttaatatattaagtaat

SEQ ID NO: 6187 - DNA, 120 bp, synthetic construct
  source 1..120: mol_type = other DNA
ctctttaaaaactaccattttctaccaaaacaaaaacaaaaacaaaacaaaacaaaaaaaccctaaaaattttacataaccaaattacctaaaatcaactaatatactaatacattaaac

SEQ ID NO: 6188 - DNA, 120 bp, synthetic construct
  source 1..120: mol_type = other DNA
ttttttaaaagttgttattttttattaaaataaaaataaaaataaaataaaataaaaaaattttaagagttttgtatgattaaattgtttgaggttagttggtatgttaatatattaagt

SEQ ID NO: 6189 - DNA, 120 bp, synthetic construct; identical to SEQ ID NO: 6185
  source 1..120: mol_type = other DNA

SEQ ID NO: 6190 - DNA, 120 bp, synthetic construct; identical to SEQ ID NO: 6186
  source 1..120: mol_type = other DNA

SEQ ID NO: 6191 - DNA, 120 bp, synthetic construct; identical to SEQ ID NO: 6187
  source 1..120: mol_type = other DNA

SEQ ID NO: 6192 - DNA, 120 bp, synthetic construct; identical to SEQ ID NO: 6188
  source 1..120: mol_type = other DNA

SEQ ID NO: 6193 - DNA, 120 bp, synthetic construct
  source 1..120: mol_type = other DNA
ccatattcacttaaaaaaaaatccaaacaacatcaataatataaataaaaaaaatacaataaaacccatataaacacaaataacaaaacctacaaatccaatactaaaatcttaaaacct

SEQ ID NO: 6194 - DNA, 120 bp, synthetic construct
  source 1..120: mol_type = other DNA
ttatatttatttagaaagggatttaagtagtattagtgatgtaaatgaggagaatataatggagtttatgtgaatataggtggtaaaatttataaatttagtgttaggattttgaggttt

SEQ ID NO: 6195 - DNA, 120 bp, synthetic construct
  source 1..120: mol_type = other DNA
tccccatattcacttaaaaaaaaatccaaacaacatcaataatataaataaaaaaaatacaccatataaacacaaataacaaaacctacaaatccaatactaaaatcttaaaacctccaa

SEQ ID NO: 6196 - DNA, 120 bp, synthetic construct
  source 1..120: mol_type = other DNA
tttttatatttatttagaaagggatttaagtagtattagtgatgtaaatgaggagaatatattatgtgaatataggtggtaaaatttataaatttagtgttaggattttgaggtttttag

SEQ ID NO: 6197 - DNA, 120 bp, synthetic construct; identical to SEQ ID NO: 6193
  source 1..120: mol_type = other DNA

SEQ ID NO: 6198 - DNA, 120 bp, synthetic construct; identical to SEQ ID NO: 6194
  source 1..120: mol_type = other DNA

SEQ ID NO: 6199 - DNA, 120 bp, synthetic construct; identical to SEQ ID NO: 6195
  source 1..120: mol_type = other DNA

SEQ ID NO: 6200 - DNA, 120 bp, synthetic construct; identical to SEQ ID NO: 6196
  source 1..120: mol_type = other DNA

SEQ ID NO: 6201 - DNA, 120 bp, synthetic construct
  source 1..120: mol_type = other DNA
aaccccacaccttaaccaacttctcaaacctcctctaaacaaaaactataaaaactacaaaacaacaaaaacattaaccaaaccaactactcaacctttctaacctcaatttccacaact

SEQ ID NO: 6202 - DNA, 120 bp, synthetic construct
  source 1..120: mol_type = other DNA
agttttgtattttggttagttttttgaattttttttgggtagaggttgtggaggttgtgaagtggtggaggtgttgattaggttagttgtttagtttttttggttttagtttttatagtt

SEQ ID NO: 6203 - DNA, 120 bp, synthetic construct
  source 1..120: mol_type = other DNA
cacaccttaaccaacttctcaaacctcctctaaacaaaaactataaaaactacaaaacaactccacacaacaaaaacattaaccaaaccaactactcaacctttctaacctcaatttcca

SEQ ID NO: 6204 - DNA, 120 bp, synthetic construct
  source 1..120: mol_type = other DNA
tgtattttggttagttttttgaattttttttgggtagaggttgtggaggttgtgaagtggttttgtgtggtggaggtgttgattaggttagttgtttagtttttttggttttagttttta

SEQ ID NO: 6205 - DNA, 120 bp, synthetic construct
  source 1..120: mol_type = other DNA
aaccccgcaccttaaccaacttctcgaacctcctctaaacaaaaactataaaaactacgaaacgacgaaaacgttaaccaaaccaactactcaacctttctaacctcaatttccacaact

SEQ ID NO: 6206 - DNA, 120 bp, synthetic construct
  source 1..120: mol_type = other DNA
agtttcgtattttggttagtttttcgaattttttttgggtagaggttgtggaggttgcgaagcggcggaggcgttgattaggttagttgtttagtttttttggttttagtttttatagtt

SEQ ID NO: 6207 - DNA, 120 bp, synthetic construct
  source 1..120: mol_type = other DNA
cgcaccttaaccaacttctcgaacctcctctaaacaaaaactataaaaactacgaaacgactccgcgcgacgaaaacgttaaccaaaccaactactcaacctttctaacctcaatttcca

SEQ ID NO: 6208 - DNA, 120 bp, synthetic construct
  source 1..120: mol_type = other DNA
cgtattttggttagtttttcgaattttttttgggtagaggttgtggaggttgcgaagcggtttcgcgcggcggaggcgttgattaggttagttgtttagtttttttggttttagttttta

SEQ ID NO: 6209 - DNA, 120 bp, synthetic construct
  source 1..120: mol_type = other DNA
ttttttaaataaactttaaaaatcatactaaaaaaaaaaaaaaataacatacacaaatatattactataattaaatttcactaactatttttcatatacctatcttttccctataaaaaa

SEQ ID NO: 6210 - DNA, 120 bp, synthetic construct
  source 1..120: mol_type = other DNA
ttttttgagtgggttttagagattatgttgaggaagaaagaaaatagtgtgtatggatgtgttgttgtggttggattttattggttgttttttatatatttgttttttttttgtgagaga

SEQ ID NO: 6211 - DNA, 120 bp, synthetic construct
  source 1..120: mol_type = other DNA
acaattttttaaataaactttaaaaatcatactaaaaaaaaaaaaaaataacatacacaaatataattaaatttcactaactatttttcatatacctatcttttccctataaaaaaaaac

SEQ ID NO: 6212 - DNA, 120 bp, synthetic construct
  source 1..120: mol_type = other DNA
gtagttttttgagtgggttttagagattatgttgaggaagaaagaaaatagtgtgtatggatgtggttggattttattggttgttttttatatatttgttttttttttgtgagagaaaat

SEQ ID NO: 6213 - DNA, 120 bp, synthetic construct
  source 1..120: mol_type = other DNA
ttttttaaataaactttaaaaatcatactaaaaaaaaaaaaaaataacgtacacgaatatattactataattaaatttcactaactatttttcatatacctatcttttccctataaaaaa

SEQ ID NO: 6214 - DNA, 120 bp, synthetic construct
  source 1..120: mol_type = other DNA
ttttttgagtgggttttagagattatgttgaggaagaaagaaaatagcgtgtacggatgtgttgttgtggttggattttattggttgttttttatatatttgttttttttttgtgagaga

SEQ ID NO: 6215 - DNA, 120 bp, synthetic construct
  source 1..120: mol_type = other DNA
acaattttttaaataaactttaaaaatcatactaaaaaaaaaaaaaaataacgtacacgaatataattaaatttcactaactatttttcatatacctatcttttccctataaaaaaaaac

SEQ ID NO: 6216 - DNA, 120 bp, synthetic construct
  source 1..120: mol_type = other DNA
gtagttttttgagtgggttttagagattatgttgaggaagaaagaaaatagcgtgtacggatgtggttggattttattggttgttttttatatatttgttttttttttgtgagagaaaat

SEQ ID NO: 6217 - DNA, 120 bp, synthetic construct
  source 1..120: mol_type = other DNA
tacctaacctaaaaaccatctacttctcccaacacccatccaacaaacaaataataacaatttctctctataccaaaatcacttccttttatccataaactcctaaataacaaaaattaa

SEQ ID NO: 6218 - DNA, 120 bp, synthetic construct
  source 1..120: mol_type = other DNA
tgtttagtttggaagttatttattttttttggtatttatttggtaggtaggtggtggtagtttttttttgtattagaattatttttttttgtttatgagtttttgggtggtagggattag

SEQ ID NO: 6219 - DNA, 120 bp, synthetic construct
  source 1..120: mol_type = other DNA
taacctaaaaaccatctacttctcccaacacccatccaacaaacaaataataacaattaacatacttctctctataccaaaatcacttccttttatccataaactcctaaataacaaaaa

SEQ ID NO: 6220 - DNA, 120 bp, synthetic construct
  source 1..120: mol_type = other DNA
tagtttggaagttatttattttttttggtatttatttggtaggtaggtggtggtagttaatatgtttttttttgtattagaattatttttttttgtttatgagtttttgggtggtaggga

SEQ ID NO: 6221 - DNA, 120 bp, synthetic construct
  source 1..120: mol_type = other DNA
tacctaacctaaaaaccatctacttctcccgacacccatccgacaaacaaataataacaatttctctctataccaaaatcacttccttttatccataaactcctaaataacaaaaattaa

SEQ ID NO: 6222 - DNA, 120 bp, synthetic construct
  source 1..120: mol_type = other DNA
tgtttagtttggaagttatttatttttttcggtatttattcggtaggtaggtggtggtagtttttttttgtattagaattatttttttttgtttatgagtttttgggtggtagggattag

SEQ ID NO: 6223 - DNA, 120 bp, synthetic construct
  source 1..120: mol_type = other DNA
taacctaaaaaccatctacttctcccgacacccatccgacaaacaaataataacaattaacatacttctctctataccaaaatcacttccttttatccataaactcctaaataacaaaaa

SEQ ID NO: 6224 - DNA, 120 bp, synthetic construct
  source 1..120: mol_type = other DNA
tagtttggaagttatttatttttttcggtatttattcggtaggtaggtggtggtagttaatatgtttttttttgtattagaattatttttttttgtttatgagtttttgggtggtaggga

SEQ ID NO: 6225 - DNA, 120 bp, synthetic construct
  source 1..120: mol_type = other DNA
aactaccaatttataccaattcataaataataattactaatttaaataataaaaaatttaaaaacaaaaaaactaataacaaattaatctaaaaaaaataaatataaataaatctcttaa

SEQ ID NO: 6226 - DNA, 120 bp, synthetic construct
  source 1..120: mol_type = other DNA
aattattaatttatattaatttatagatagtgattattagtttaaatagtaagggatttggagataggaggattggtaataaattggtttggagaagataaatgtggatgggttttttag

SEQ ID NO: 6227 - DNA, 120 bp, synthetic construct
  source 1..120: mol_type = other DNA
accaatttataccaattcataaataataattactaatttaaataataaaaaatttaaataaaataaaacaaaaaaactaataacaaattaatctaaaaaaaataaatataaataaatctc

SEQ ID NO: 6228 - DNA, 120 bp, synthetic construct
  source 1..120: mol_type = other DNA
attaatttatattaatttatagatagtgattattagtttaaatagtaagggatttggatggagtaagataggaggattggtaataaattggtttggagaagataaatgtggatgggtttt

SEQ ID NO: 6229 - DNA, 120 bp, synthetic construct; identical to SEQ ID NO: 6225
  source 1..120: mol_type = other DNA

SEQ ID NO: 6230 - DNA, 120 bp, synthetic construct; identical to SEQ ID NO: 6226
  source 1..120: mol_type = other DNA

SEQ ID NO: 6231 - DNA, 120 bp, synthetic construct; identical to SEQ ID NO: 6227
  source 1..120: mol_type = other DNA

SEQ ID NO: 6232 - DNA, 120 bp, synthetic construct; identical to SEQ ID NO: 6228
  source 1..120: mol_type = other DNA

SEQ ID NO: 6233 - DNA, 120 bp, synthetic construct
  source 1..120: mol_type = other DNA
ccccaaaacttctcaactaacattctccacataaacaccaattccacaattactaactataacacatacaaaaaaaaaaaaacccataaaaaacaatatataaactataaccctaaaaaa

SEQ ID NO: 6234 - DNA, 120 bp, synthetic construct
  source 1..120: mol_type = other DNA
ttttaaaattttttagttagtattttttatgtaagtattaattttatagttattaattgtaatgtgtgtagggaagaaaaggtttgtaggggatggtatgtgagttgtgattttgaaagg

SEQ ID NO: 6235 - DNA, 120 bp, synthetic construct
  source 1..120: mol_type = other DNA
tacccccaaaacttctcaactaacattctccacataaacaccaattccacaattactaactatacaaaaaaaaaaaaacccataaaaaacaatatataaactataaccctaaaaaactta

SEQ ID NO: 6236 - DNA, 120 bp, synthetic construct
  source 1..120: mol_type = other DNA
tgtttttaaaattttttagttagtattttttatgtaagtattaattttatagttattaattgtgtagggaagaaaaggtttgtaggggatggtatgtgagttgtgattttgaaaggtttg

SEQ ID NO: 6237 - DNA, 120 bp, synthetic construct
  source 1..120: mol_type = other DNA
ccccaaaacttctcaactaacattctccacgtaaacaccaattccacaattactaactataacgcgtacaaaaaaaaaaaaacccgtaaaaaacgatatataaactataaccctaaaaaa

SEQ ID NO: 6238 - DNA, 120 bp, synthetic construct
  source 1..120: mol_type = other DNA
ttttaaaattttttagttagtattttttacgtaagtattaattttatagttattaattgtaacgcgtgtagggaagaaaaggttcgtaggggacggtatgtgagttgtgattttgaaagg

SEQ ID NO: 6239 - DNA, 120 bp, synthetic construct
  source 1..120: mol_type = other DNA
tacccccaaaacttctcaactaacattctccacgtaaacaccaattccacaattactaactatacaaaaaaaaaaaaacccgtaaaaaacgatatataaactataaccctaaaaaactta

SEQ ID NO: 6240 - DNA, 120 bp, synthetic construct
  source 1..120: mol_type = other DNA
tgtttttaaaattttttagttagtattttttacgtaagtattaattttatagttattaattgtgtagggaagaaaaggttcgtaggggacggtatgtgagttgtgattttgaaaggtttg

SEQ ID NO: 6241 - DNA, 120 bp, synthetic construct
  source 1..120: mol_type = other DNA
aaaacaataattttaattactatataaaaattttaatactttaaaactaaaaaaaaataataaacttaaattttaatctaaatcaaaaattatttttttctataatttattattaaatta

SEQ ID NO: 6242 - DNA, 120 bp, synthetic construct
  source 1..120: mol_type = other DNA
agaatagtaattttgattattatataaaaattttaatgttttagaattgaaagaaaatgataaatttgagttttaatttgaattaaaaattgtttttttttgtaatttattgttaagtta

SEQ ID NO: 6243 - DNA, 120 bp, synthetic construct
  source 1..120: mol_type = other DNA
taacaaaacaataattttaattactatataaaaattttaatactttaaaactaaaaaaaaataaattttaatctaaatcaaaaattatttttttctataatttattattaaattaaccta

SEQ ID NO: 6244 - DNA, 120 bp, synthetic construct
  source 1..120: mol_type = other DNA
tgatagaatagtaattttgattattatataaaaattttaatgttttagaattgaaagaaaatgagttttaatttgaattaaaaattgtttttttttgtaatttattgttaagttaatttg

SEQ ID NO: 6245 - DNA, 120 bp, synthetic construct; identical to SEQ ID NO: 6241
  source 1..120: mol_type = other DNA

SEQ ID NO: 6246 - DNA, 120 bp, synthetic construct; identical to SEQ ID NO: 6242
  source 1..120: mol_type = other DNA

SEQ ID NO: 6247 - DNA, 120 bp, synthetic construct; identical to SEQ ID NO: 6243
  source 1..120: mol_type = other DNA

SEQ ID NO: 6248 - DNA, 120 bp, synthetic construct; identical to SEQ ID NO: 6244
  source 1..120: mol_type = other DNA

SEQ ID NO: 6249 - DNA, 120 bp, synthetic construct
  source 1..120: mol_type = other DNA
tttaaaaaacattataaactctataaatttaaaaaacttacatttaaataaactaaaaattataaaaaaaaaaaaaaattaaatataaataactttatttaactctacaaaactaacaaa

SEQ ID NO: 6250 - DNA, 120 bp, synthetic construct
  source 1..120: mol_type = other DNA
tttagaagatattgtaaattttgtgagtttagagagtttgtatttgaatagattaaaagttatagaagaaagagaaagttgagtatgagtagttttatttggttttgtaaagttggtaag

SEQ ID NO: 6251 - DNA, 120 bp, synthetic construct
  source 1..120: mol_type = other DNA
aaaaacattataaactctataaatttaaaaaacttacatttaaataaactaaaaattaaaacataataaaaaaaaaaaaaaattaaatataaataactttatttaactctacaaaactaa

SEQ ID NO: 6252 - DNA, 120 bp, synthetic construct
  source 1..120: mol_type = other DNA
gaagatattgtaaattttgtgagtttagagagtttgtatttgaatagattaaaagttaagatgtaatagaagaaagagaaagttgagtatgagtagttttatttggttttgtaaagttgg

SEQ ID NO: 6253 - DNA, 120 bp, synthetic construct; identical to SEQ ID NO: 6249
  source 1..120: mol_type = other DNA

SEQ ID NO: 6254 - DNA, 120 bp, synthetic construct; identical to SEQ ID NO: 6250
  source 1..120: mol_type = other DNA

SEQ ID NO: 6255 - DNA, 120 bp, synthetic construct
  source 1..120: mol_type = other DNA
aaaaacattataaactctataaatttaaaaaacttacatttaaataaactaaaaattaaaacgtaataaaaaaaaaaaaaaattaaatataaataactttatttaactctacaaaactaa

SEQ ID NO: 6256 - DNA, 120 bp, synthetic construct
  source 1..120: mol_type = other DNA
gaagatattgtaaattttgtgagtttagagagtttgtatttgaatagattaaaagttaagacgtaatagaagaaagagaaagttgagtatgagtagttttatttggttttgtaaagttgg

SEQ ID NO: 6257 - DNA, 120 bp, synthetic construct
  source 1..120: mol_type = other DNA
aatatatattatcatatttaaattatcaataactaatttacaatcacaaaactaaaaaataacattcaaattcaaatctatctaaccctaaaactaaaacttacaaacattattaaatac

SEQ ID NO: 6258 - DNA, 120 bp, synthetic construct
  source 1..120: mol_type = other DNA
ggtatgtattattatgtttaggttattagtgattaatttgtggttatagagttaggaagtggtatttaaatttagatttatttgattttaaagttagggtttataaatattattgaatat

SEQ ID NO: 6259 - DNA, 120 bp, synthetic construct
  source 1..120: mol_type = other DNA
atattatcatatttaaattatcaataactaatttacaatcacaaaactaaaaaataacataaccaacattcaaattcaaatctatctaaccctaaaactaaaacttacaaacattattaa

SEQ ID NO: 6260 - DNA, 120 bp, synthetic construct
  source 1..120: mol_type = other DNA
gtattattatgtttaggttattagtgattaatttgtggttatagagttaggaagtggtatagttagtatttaaatttagatttatttgattttaaagttagggtttataaatattattga

SEQ ID NO: 6261 - DNA, 120 bp, synthetic construct
  source 1..120: mol_type = other DNA
aatatatattatcatatttaaattatcaataactaatttacgatcacaaaactaaaaaataacattcaaattcaaatctatctaaccctaaaactaaaacttacaaacattattaaatac

SEQ ID NO: 6262 - DNA, 120 bp, synthetic construct
  source 1..120: mol_type = other DNA
ggtatgtattattatgtttaggttattagtgattaatttgcggttatagagttaggaagtggtatttaaatttagatttatttgattttaaagttagggtttataaatattattgaatat

SEQ ID NO: 6263 - DNA, 120 bp, synthetic construct
  source 1..120: mol_type = other DNA
atattatcatatttaaattatcaataactaatttacgatcacaaaactaaaaaataacataaccaacattcaaattcaaatctatctaaccctaaaactaaaacttacaaacattattaa

SEQ ID NO: 6264 - DNA, 120 bp, synthetic construct
  source 1..120: mol_type = other DNA
gtattattatgtttaggttattagtgattaatttgcggttatagagttaggaagtggtatagttagtatttaaatttagatttatttgattttaaagttagggtttataaatattattga

SEQ ID NO: 6265 - DNA, 120 bp, synthetic construct
  source 1..120: mol_type = other DNA
cacccaaactcatataatttcaaaaaccttcaacttctaaaaatctaaaaaacaatccaaaaattaaaatatattcttaaacctattacaataattcacataacttttcattaaataaat

SEQ ID NO: 6266 - DNA, 120 bp, synthetic construct
  source 1..120: mol_type = other DNA
tatttaagtttatataattttagaggtttttgatttttaaaggtttaaaaaatagtttaagaattaaggtgtgtttttgaatttattataatagtttatatagttttttattaaatgaat

SEQ ID NO: 6267 - DNA, 120 bp, synthetic construct
  source 1..120: mol_type = other DNA
caacacccaaactcatataatttcaaaaaccttcaacttctaaaaatctaaaaaacaatccaaaatatattcttaaacctattacaataattcacataacttttcattaaataaatcaaa

SEQ ID NO: 6268 - DNA, 120 bp, synthetic construct
  source 1..120: mol_type = other DNA
taatatttaagtttatataattttagaggtttttgatttttaaaggtttaaaaaatagtttaaggtgtgtttttgaatttattataatagtttatatagttttttattaaatgaattaaa

SEQ ID NO: 6269 - DNA, 120 bp, synthetic construct
  source 1..120: mol_type = other DNA
cacccaaactcatataatttcaaaaaccttcgacttctaaaaatctaaaaaacaatccaaaaattaaaatatattcttaaacctattacaataattcacataacttttcattaaataaat

SEQ ID NO: 6270 - DNA, 120 bp, synthetic construct
  source 1..120: mol_type = other DNA
tatttaagtttatataattttagaggttttcgatttttaaaggtttaaaaaatagtttaagaattaaggtgtgtttttgaatttattataatagtttatatagttttttattaaatgaat

SEQ ID NO: 6271 - DNA, 120 bp, synthetic construct
  source 1..120: mol_type = other DNA
caacacccaaactcatataatttcaaaaaccttcgacttctaaaaatctaaaaaacaatccaaaatatattcttaaacctattacaataattcacataacttttcattaaataaatcaaa

SEQ ID NO: 6272 - DNA, 120 bp, synthetic construct
  source 1..120: mol_type = other DNA
taatatttaagtttatataattttagaggttttcgatttttaaaggtttaaaaaatagtttaaggtgtgtttttgaatttattataatagtttatatagttttttattaaatgaattaaa

SEQ ID NO: 6273 - DNA, 120 bp, synthetic construct
  source 1..120: mol_type = other DNA
ttataatattataaatttaacattttcatttctttattatcataaaattttaaaaaaataaaaaataacataaatattcaatttttctacaaaaacaaaaaaaatctaaattttataaaa

SEQ ID NO: 6274 - DNA, 120 bp, synthetic construct
  source 1..120: mol_type = other DNA
ttgtaatattgtaggtttgatatttttatttttttattattataggattttgagggggtgaagagtaatataaatgtttaatttttttataaagataaaaaaaatttaaattttataggg

SEQ ID NO: 6275 - DNA, 120 bp, synthetic construct
  source 1..120: mol_type = other DNA
tctctttataatattataaatttaacattttcatttctttattatcataaaattttaaaaaaacataaatattcaatttttctacaaaaacaaaaaaaatctaaattttataaaacatta

SEQ ID NO: 6276 - DNA, 120 bp, synthetic construct
  source 1..120: mol_type = other DNA
tttttttgtaatattgtaggtttgatatttttatttttttattattataggattttgagggaatataaatgtttaatttttttataaagataaaaaaaatttaaattttatagggtatta

SEQ ID NO: 6277 - DNA, 120 bp, synthetic construct; identical to SEQ ID NO: 6273
  source 1..120: mol_type = other DNA

SEQ ID NO: 6278 - DNA, 120 bp, synthetic construct; identical to SEQ ID NO: 6274
  source 1..120: mol_type = other DNA

SEQ ID NO: 6279 - DNA, 120 bp, synthetic construct; identical to SEQ ID NO: 6275
  source 1..120: mol_type = other DNA

SEQ ID NO: 6280 - DNA, 120 bp, synthetic construct; identical to SEQ ID NO: 6276
  source 1..120: mol_type = other DNA

SEQ ID NO: 6281 - DNA, 120 bp, synthetic construct
  source 1..120: mol_type = other DNA
acaaaaaaactttactaataatcatcaaacataaacccttcaaaaaaaaaacccatctataaaccccaacaaaaaacctaacaccaataaatacctaaaaaacacttaataacaattcac

SEQ ID NO: 6282 - DNA, 120 bp, synthetic construct
  source 1..120: mol_type = other DNA
ataggaaggttttgttaatgattgttaggtatgagttttttaaggaagggatttgtttgtaggttttagtagaggatttgatattagtgggtgtttagggagtatttagtggtagtttat

SEQ ID NO: 6283 - DNA, 120 bp, synthetic construct
  source 1..120: mol_type = other DNA
aaaaactttactaataatcatcaaacataaacccttcaaaaaaaaaacccatctataaaaaacaaaaccccaacaaaaaacctaacaccaataaatacctaaaaaacacttaataacaat

SEQ ID NO: 6284 - DNA, 120 bp, synthetic construct
  source 1..120: mol_type = other DNA
gaaggttttgttaatgattgttaggtatgagttttttaaggaagggatttgtttgtaggaagtagggttttagtagaggatttgatattagtgggtgtttagggagtatttagtggtagt

SEQ ID NO: 6285 - DNA, 120 bp, synthetic construct
  source 1..120: mol_type = other DNA
acaaaaaaactttactaataatcgtcaaacataaacccttcaaaaaaaaaacccgtctataaaccccaacaaaaaacctaacaccaataaatacctaaaaaacacttaataacaattcac

SEQ ID NO: 6286 - DNA, 120 bp, synthetic construct
  source 1..120: mol_type = other DNA
ataggaaggttttgttaatgatcgttaggtatgagttttttaaggaagggattcgtttgtaggttttagtagaggatttgatattagtgggtgtttagggagtatttagtggtagtttat

SEQ ID NO: 6287 - DNA, 120 bp, synthetic construct
  source 1..120: mol_type = other DNA
aaaaactttactaataatcgtcaaacataaacccttcaaaaaaaaaacccgtctataaaaaacaaaaccccaacaaaaaacctaacaccaataaatacctaaaaaacacttaataacaat

SEQ ID NO: 6288 - DNA, 120 bp, synthetic construct
  source 1..120: mol_type = other DNA
gaaggttttgttaatgatcgttaggtatgagttttttaaggaagggattcgtttgtaggaagtagggttttagtagaggatttgatattagtgggtgtttagggagtatttagtggtagt

SEQ ID NO: 6289 - DNA, 120 bp, synthetic construct
  source 1..120: mol_type = other DNA
aaattcaaaaaaccaaatatcaaatattaatactactataaattcaattacaataaaataaaaaaaatcacaattcaacaatattaaaactaaaacaaaattatttttaaaaattcccaa

SEQ ID NO: 6290 - DNA, 120 bp, synthetic construct
  source 1..120: mol_type = other DNA
aagtttaaaaagttaagtgttagatgttagtgttgttgtgagtttaattatgataagatagaaaaaattataatttaatagtattggaattaaaatagaattatttttaaaaatttttga

SEQ ID NO: 6291 - DNA, 120 bp, synthetic construct
  source 1..120: mol_type = other DNA
aataaaattcaaaaaaccaaatatcaaatattaatactactataaattcaattacaataaaatcacaattcaacaatattaaaactaaaacaaaattatttttaaaaattcccaaaaaca

SEQ ID NO: 6292 - DNA, 120 bp, synthetic construct
  source 1..120: mol_type = other DNA
gataaagtttaaaaagttaagtgttagatgttagtgttgttgtgagtttaattatgataagattataatttaatagtattggaattaaaatagaattatttttaaaaatttttgagaata

SEQ ID NO: 6293 - DNA, 120 bp, synthetic construct
  source 1..120: mol_type = other DNA
aaattcaaaaaaccaaatatcaaatattaatactactataaattcaattacgataaaataaaaaaaatcacaattcaacaatattaaaactaaaacaaaattatttttaaaaattcccga

SEQ ID NO: 6294 - DNA, 120 bp, synthetic construct
  source 1..120: mol_type = other DNA
aagtttaaaaagttaagtgttagatgttagtgttgttgtgagtttaattacgataagatagaaaaaattataatttaatagtattggaattaaaatagaattatttttaaaaattttcga

SEQ ID NO: 6295 - DNA, 120 bp, synthetic construct
  source 1..120: mol_type = other DNA
aataaaattcaaaaaaccaaatatcaaatattaatactactataaattcaattacgataaaatcacaattcaacaatattaaaactaaaacaaaattatttttaaaaattcccgaaaaca

SEQ ID NO: 6296 - DNA, 120 bp, synthetic construct
  source 1..120: mol_type = other DNA
gataaagtttaaaaagttaagtgttagatgttagtgttgttgtgagtttaattacgataagattataatttaatagtattggaattaaaatagaattatttttaaaaattttcgagaata

SEQ ID NO: 6297 - DNA, 120 bp, synthetic construct
  source 1..120: mol_type = other DNA
ccaactctaattacacaatatcacatatcacacatcatcaacccaaaaaaatcaaaaaaaaaacccaaacaactataacatatataaaaaaataaacaataaacatttttaaaatcctaa

SEQ ID NO: 6298 - DNA, 120 bp, synthetic construct
  source 1..120: mol_type = other DNA
ttaattttagttgtatagtgttatatgttatatattattagtttaaggaggttaaaaagggagtttaggtagttataatgtatatgaagagatgaataatgaatatttttaaaattttga

SEQ ID NO: 6299 - DNA, 120 bp, synthetic construct
  source 1..120: mol_type = other DNA
aataccaactctaattacacaatatcacatatcacacatcatcaacccaaaaaaatcaaaaaaacaactataacatatataaaaaaataaacaataaacatttttaaaatcctaatctaa

SEQ ID NO: 6300 - DNA, 120 bp, synthetic construct
  source 1..120: mol_type = other DNA
aatattaattttagttgtatagtgttatatgttatatattattagtttaaggaggttaaaaaggtagttataatgtatatgaagagatgaataatgaatatttttaaaattttgatttag

SEQ ID NO: 6301 - DNA, 120 bp, synthetic construct
  source 1..120: mol_type = other DNA
ccaactctaattacacaatatcacatatcacacatcatcaacccaaaaaaatcaaaaaaaaaacccaaacaactataacgtatataaaaaaataaacaataaacatttttaaaatcctaa

SEQ ID NO: 6302 - DNA, 120 bp, synthetic construct
  source 1..120: mol_type = other DNA
ttaattttagttgtatagtgttatatgttatatattattagtttaaggaggttaaaaagggagtttaggtagttataacgtatatgaagagatgaataatgaatatttttaaaattttga

SEQ ID NO: 6303 - DNA, 120 bp, synthetic construct
  source 1..120: mol_type = other DNA
aataccaactctaattacacaatatcacatatcacacatcatcaacccaaaaaaatcaaaaaaacaactataacgtatataaaaaaataaacaataaacatttttaaaatcctaatctaa

SEQ ID NO: 6304 - DNA, 120 bp, synthetic construct
  source 1..120: mol_type = other DNA
aatattaattttagttgtatagtgttatatgttatatattattagtttaaggaggttaaaaaggtagttataacgtatatgaagagatgaataatgaatatttttaaaattttgatttag

SEQ ID NO: 6305 - DNA, 120 bp, synthetic construct
  source 1..120: mol_type = other DNA
aacacctaccaacctcaaaaccccaccctctaccttcactcacaccactctccttcaatctccccaaaacctatttcataaataaaatccccttacccacataaaaatctcattcctcct

SEQ ID NO: 6306 - DNA, 120 bp, synthetic construct
  source 1..120: mol_type = other DNA
agtgtttgttgattttggggttttgttttttgtttttgtttgtgttgtttttttttagtttttttagggtttgttttatggatagggtttttttgtttgtgtgaaagttttatttttttt

SEQ ID NO: 6307 - DNA, 120 bp, synthetic construct
  source 1..120: mol_type = other DNA
actacaacacctaccaacctcaaaaccccaccctctaccttcactcacaccactctccttcaaacctatttcataaataaaatccccttacccacataaaaatctcattcctcctcaact

SEQ ID NO: 6308 - DNA, 120 bp, synthetic construct
  source 1..120: mol_type = other DNA
attgtagtgtttgttgattttggggttttgttttttgtttttgtttgtgttgtttttttttgggtttgttttatggatagggtttttttgtttgtgtgaaagttttatttttttttagtt

SEQ ID NO: 6309 - DNA, 120 bp, synthetic construct
  source 1..120: mol_type = other DNA
aacgcctaccgacctcgaaaccccgccctctaccttcgctcgcgccgctctccttcaatctccccaaaacctatttcataaataaaatccccttacccgcgtaaaaatctcattcctcct

SEQ ID NO: 6310 - DNA, 120 bp, synthetic construct
  source 1..120: mol_type = other DNA
agcgtttgtcgatttcggggtttcgttttttgttttcgttcgcgtcgtttttttttagtttttttagggtttgttttatggatagggtttttttgttcgcgtgaaagttttatttttttt

SEQ ID NO: 6311 - DNA, 120 bp, synthetic construct
  source 1..120: mol_type = other DNA
actacaacgcctaccgacctcgaaaccccgccctctaccttcgctcgcgccgctctccttcgaacctatttcataaataaaatccccttacccgcgtaaaaatctcattcctcctcaact

SEQ ID NO: 6312 - DNA, 120 bp, synthetic construct
  source 1..120: mol_type = other DNA
attgtagcgtttgtcgatttcggggtttcgttttttgttttcgttcgcgtcgttttttttcgggtttgttttatggatagggtttttttgttcgcgtgaaagttttatttttttttagtt

SEQ ID NO: 6313 - DNA, 120 bp, synthetic construct
  source 1..120: mol_type = other DNA
tcatcataaaatatccttccacatccctaatcttacaatttacttaatattaatttaaccatcatatacttactatttaccctatatattatccttttccatacatttactttccaccca

SEQ ID NO: 6314 - DNA, 120 bp, synthetic construct
  source 1..120: mol_type = other DNA
ttattatgagatgtttttttgtatttttggttttgtagtttatttggtgttaatttagttgttatgtgtttattgtttgttttgtgtattatttttttttatatatttgttttttattta

SEQ ID NO: 6315 - DNA, 120 bp, synthetic construct
  source 1..120: mol_type = other DNA
cataaaatatccttccacatccctaatcttacaatttacttaatattaatttaaccatcacaacctcatatacttactatttaccctatatattatccttttccatacatttactttcca

SEQ ID NO: 6316 - DNA, 120 bp, synthetic construct
  source 1..120: mol_type = other DNA
tatgagatgtttttttgtatttttggttttgtagtttatttggtgttaatttagttgttatagttttatgtgtttattgtttgttttgtgtattatttttttttatatatttgtttttta

SEQ ID NO: 6317 - DNA, 120 bp, synthetic construct
  source 1..120: mol_type = other DNA
tcatcataaaatatccttccgcatccctaatcttacaatttacttaatattaatttaaccgtcatatacttactatttaccctatatattatccttttccatacatttactttccaccca

SEQ ID NO: 6318 - DNA, 120 bp, synthetic construct
  source 1..120: mol_type = other DNA
ttattatgagatgttttttcgtatttttggttttgtagtttatttggtgttaatttagtcgttatgtgtttattgtttgttttgtgtattatttttttttatatatttgttttttattta

SEQ ID NO: 6319 - DNA, 120 bp, synthetic construct
  source 1..120: mol_type = other DNA
cataaaatatccttccgcatccctaatcttacaatttacttaatattaatttaaccgtcacaacctcatatacttactatttaccctatatattatccttttccatacatttactttcca

SEQ ID NO: 6320 - DNA, 120 bp, synthetic construct
  source 1..120: mol_type = other DNA
tatgagatgttttttcgtatttttggttttgtagtttatttggtgttaatttagtcgttatagttttatgtgtttattgtttgttttgtgtattatttttttttatatatttgtttttta

SEQ ID NO: 6321 - DNA, 120 bp, synthetic construct
  source 1..120: mol_type = other DNA
acttaaataccacccaaataaacaacacacccttcattcaaatctatttccatcctcaaacctaacttcaacaacttccacaaacccaatacccaaaaactaacataatacaccaaacaa

SEQ ID NO: 6322 - DNA, 120 bp, synthetic construct
  source 1..120: mol_type = other DNA
atttgagtgttatttggataaatggtgtgttttttatttgagtttgtttttatttttgggtttgattttagtaatttttataggtttgatgtttgggagttggtatgatgtattaggtag

SEQ ID NO: 6323 - DNA, 120 bp, synthetic construct
  source 1..120: mol_type = other DNA
aataccacccaaataaacaacacacccttcattcaaatctatttccatcctcaaacaaaacacccactaacttcaacaacttccacaaacccaatacccaaaaactaacataatacacca

SEQ ID NO: 6324 - DNA, 120 bp, synthetic construct
  source 1..120: mol_type = other DNA
agtgttatttggataaatggtgtgttttttatttgagtttgtttttatttttgggtaaaatatttattgattttagtaatttttataggtttgatgtttgggagttggtatgatgtatta

SEQ ID NO: 6325 - DNA, 120 bp, synthetic construct
  source 1..120: mol_type = other DNA
acttaaataccacccgaataaacgacgcgcccttcattcgaatctatttccatcctcgaacctaacttcaacaacttccacaaacccgatacccgaaaactaacataatacaccaaacaa

SEQ ID NO: 6326 - DNA, 120 bp, synthetic construct
  source 1..120: mol_type = other DNA
atttgagtgttattcggataaacggcgcgttttttattcgagtttgtttttattttcgggtttgattttagtaatttttataggttcgatgttcgggagttggtatgatgtattaggtag

SEQ ID NO: 6327 - DNA, 120 bp, synthetic construct
  source 1..120: mol_type = other DNA
aataccacccgaataaacgacgcgcccttcattcgaatctatttccatcctcgaacaaaacacccactaacttcaacaacttccacaaacccgatacccgaaaactaacataatacacca

SEQ ID NO: 6328 - DNA, 120 bp, synthetic construct
  source 1..120: mol_type = other DNA
agtgttattcggataaacggcgcgttttttattcgagtttgtttttattttcgggtaaaatatttattgattttagtaatttttataggttcgatgttcgggagttggtatgatgtatta

SEQ ID NO: 6329 - DNA, 120 bp, synthetic construct
  source 1..120: mol_type = other DNA
aaaatataaaccttaaaatcaaataaacttaaatttaaatttaaaccctactacatactaccaaacacaatataataatcaacaaaatttcaacacatcaattttctcatctttaaaata

SEQ ID NO: 6330 - DNA, 120 bp, synthetic construct
  source 1..120: mol_type = other DNA
agaatatgagttttaaagttaggtaaatttgggtttgaatttgggttttgttatatattgttagatatagtgtggtaattaataggattttaatatattaatttttttatttttagaatg

SEQ ID NO: 6331 - DNA, 120 bp, synthetic construct
  source 1..120: mol_type = other DNA
taaaaaaaatataaaccttaaaatcaaataaacttaaatttaaatttaaaccctactacatacaatataataatcaacaaaatttcaacacatcaattttctcatctttaaaataaatct

SEQ ID NO: 6332 - DNA, 120 bp, synthetic construct
  source 1..120: mol_type = other DNA
tggagagaatatgagttttaaagttaggtaaatttgggtttgaatttgggttttgttatatatagtgtggtaattaataggattttaatatattaatttttttatttttagaatgaattt

SEQ ID NO: 6333 - DNA, 120 bp, synthetic construct; identical to SEQ ID NO: 6329
  source 1..120: mol_type = other DNA

SEQ ID NO: 6334 - DNA, 120 bp, synthetic construct; identical to SEQ ID NO: 6330
  source 1..120: mol_type = other DNA

SEQ ID NO: 6335 - DNA, 120 bp, synthetic construct; identical to SEQ ID NO: 6331
  source 1..120: mol_type = other DNA

SEQ ID NO: 6336 - DNA, 120 bp, synthetic construct; identical to SEQ ID NO: 6332
  source 1..120: mol_type = other DNA

SEQ ID NO: 6337 - DNA, 120 bp, synthetic construct
  source 1..120: mol_type = other DNA
aaattcaaaatttaaaatacatatatatataattattacataacccactctaaaataataaaaaattcaataaaaatacatataaaatactaactataaattatcacacatattatcatc

SEQ ID NO: 6338 - DNA, 120 bp, synthetic construct
  source 1..120: mol_type = other DNA
gagtttagaatttaaaatatatatgtatataattgttgtatagtttattttgaagtagtagaagatttaatgaaaatgtatgtggaatgttgattataaattattatatatattattatt

SEQ ID NO: 6339 - DNA, 120 bp, synthetic construct
  source 1..120: mol_type = other DNA
caaaatttaaaatacatatatatataattattacataacccactctaaaataataattacaaataaaaaattcaataaaaatacatataaaatactaactataaattatcacacatatta

SEQ ID NO: 6340 - DNA, 120 bp, synthetic construct
  source 1..120: mol_type = other DNA
tagaatttaaaatatatatgtatataattgttgtatagtttattttgaagtagtagttgtaaataaaagatttaatgaaaatgtatgtggaatgttgattataaattattatatatatta

SEQ ID NO: 6341 - DNA, 120 bp, synthetic construct; identical to SEQ ID NO: 6337
  source 1..120: mol_type = other DNA

SEQ ID NO: 6342 - DNA, 120 bp, synthetic construct; identical to SEQ ID NO: 6338
  source 1..120: mol_type = other DNA

SEQ ID NO: 6343 - DNA, 120 bp, synthetic construct; identical to SEQ ID NO: 6339
  source 1..120: mol_type = other DNA

SEQ ID NO: 6344 - DNA, 120 bp, synthetic construct; identical to SEQ ID NO: 6340
  source 1..120: mol_type = other DNA

SEQ ID NO: 6345 - DNA, 120 bp, synthetic construct
  source 1..120: mol_type = other DNA
aatctaaacctaaaaataaaactatttaaaaacccactaaataactaacatacaaccaaaactaacttacaacaactttctaattatctccatttcacaaataaaaaaactataccacta

SEQ ID NO: 6346 - DNA, 120 bp, synthetic construct
  source 1..120: mol_type = other DNA
ggtttgggtttgaagatggggttatttaaaagtttgttgggtaattgatatgtagttagggttgatttataatagttttttgattatttttattttataaatgaagaaattatattattg

SEQ ID NO: 6347 - DNA, 120 bp, synthetic construct
  source 1..120: mol_type = other DNA
aaacctaaaaataaaactatttaaaaacccactaaataactaacatacaaccaaaactaaaaaccactaacttacaacaactttctaattatctccatttcacaaataaaaaaactatac

SEQ ID NO: 6348 - DNA, 120 bp, synthetic construct
  source 1..120: mol_type = other DNA
gggtttgaagatggggttatttaaaagtttgttgggtaattgatatgtagttagggttgagaattattgatttataatagttttttgattatttttattttataaatgaagaaattatat

SEQ ID NO: 6349 - DNA, 120 bp, synthetic construct
  source 1..120: mol_type = other DNA
aatctaaacctaaaaataaaactatttaaaaacccgctaaataactaacatacaaccaaaactaacttacaacaactttctaattatctccatttcacaaataaaaaaactataccacta

SEQ ID NO: 6350 - DNA, 120 bp, synthetic construct
  source 1..120: mol_type = other DNA
ggtttgggtttgaagatggggttatttaaaagttcgttgggtaattgatatgtagttagggttgatttataatagttttttgattatttttattttataaatgaagaaattatattattg

SEQ ID NO: 6351 - DNA, 120 bp, synthetic construct
  source 1..120: mol_type = other DNA
aaacctaaaaataaaactatttaaaaacccgctaaataactaacatacaaccaaaactaaaaaccactaacttacaacaactttctaattatctccatttcacaaataaaaaaactatac

SEQ ID NO: 6352 - DNA, 120 bp, synthetic construct
  source 1..120: mol_type = other DNA
gggtttgaagatggggttatttaaaagttcgttgggtaattgatatgtagttagggttgagaattattgatttataatagttttttgattatttttattttataaatgaagaaattatat

SEQ ID NO: 6353 - DNA, 120 bp, synthetic construct
  source 1..120: mol_type = other DNA
acaacaataaattctcaaaaaacaaatctatttccaaaaaaaacaaaatatatattaaaaaactacatttacactatcacacatacacacacaaaaatatacacatatatatatccatat

SEQ ID NO: 6354 - DNA, 120 bp, synthetic construct
  source 1..120: mol_type = other DNA
gtaataatgaatttttaaagggtaagtttgtttttaagaaaagtagaatatatattgaagaattgtatttatattattatatatatatatataagaatatatatatgtgtgtgtttatat

SEQ ID NO: 6355 - DNA, 120 bp, synthetic construct
  source 1..120: mol_type = other DNA
caataaattctcaaaaaacaaatctatttccaaaaaaaacaaaatatatattaaaaaacaaatcactacatttacactatcacacatacacacacaaaaatatacacatatatatatcca

SEQ ID NO: 6356 - DNA, 120 bp, synthetic construct
  source 1..120: mol_type = other DNA
taatgaatttttaaagggtaagtttgtttttaagaaaagtagaatatatattgaagaataggttattgtatttatattattatatatatatatataagaatatatatatgtgtgtgttta

SEQ ID NO: 6357 - DNA, 120 bp, synthetic construct; identical to SEQ ID NO: 6353
  source 1..120: mol_type = other DNA

SEQ ID NO: 6358 - DNA, 120 bp, synthetic construct; identical to SEQ ID NO: 6354
  source 1..120: mol_type = other DNA

SEQ ID NO: 6359 - DNA, 120 bp, synthetic construct; identical to SEQ ID NO: 6355
  source 1..120: mol_type = other DNA

SEQ ID NO: 6360 - DNA, 120 bp, synthetic construct; identical to SEQ ID NO: 6356
  source 1..120: mol_type = other DNA

SEQ ID NO: 6361 - DNA, 120 bp, synthetic construct
  source 1..120: mol_type = other DNA
actaaaccaatatacactaaaatataaaaaaaaacaacaaaaattaactcaaaaacatttaataaactaactaaaaacaataattatactttcaatacctttatatcacaccattcaacc

SEQ ID NO: 6362 - DNA, 120 bp, synthetic construct
  source 1..120: mol_type = other DNA
gttaaattaatatatattagggtataagaagaagtgatagaaattgatttaggagtgtttagtaaattaattgaaggtaatgattatgtttttaatgtttttgtattatattatttagtt

SEQ ID NO: 6363 - DNA, 120 bp, synthetic construct
  source 1..120: mol_type = other DNA
accaatatacactaaaatataaaaaaaaacaacaaaaattaactcaaaaacatttacaaataaactataaactaactaaaaacaataattatactttcaatacctttatatcacaccatt

SEQ ID NO: 6364 - DNA, 120 bp, synthetic construct
  source 1..120: mol_type = other DNA
attaatatatattagggtataagaagaagtgatagaaattgatttaggagtgtttatagataaattgtaaattaattgaaggtaatgattatgtttttaatgtttttgtattatattatt

SEQ ID NO: 6365 - DNA, 120 bp, synthetic construct
  source 1..120: mol_type = other DNA
actaaaccaatatacactaaaatataaaaaaaaacgacaaaaattaactcaaaaacgtttaataaactaactaaaaacaataattatactttcaatacctttatatcacaccattcaacc

SEQ ID NO: 6366 - DNA, 120 bp, synthetic construct
  source 1..120: mol_type = other DNA
gttaaattaatatatattagggtataagaagaagcgatagaaattgatttaggagcgtttagtaaattaattgaaggtaatgattatgtttttaatgtttttgtattatattatttagtt

SEQ ID NO: 6367 - DNA, 120 bp, synthetic construct
  source 1..120: mol_type = other DNA
accaatatacactaaaatataaaaaaaaacgacaaaaattaactcaaaaacgtttacaaataaactataaactaactaaaaacaataattatactttcaatacctttatatcacaccatt

SEQ ID NO: 6368 - DNA, 120 bp, synthetic construct
  source 1..120: mol_type = other DNA
attaatatatattagggtataagaagaagcgatagaaattgatttaggagcgtttatagataaattgtaaattaattgaaggtaatgattatgtttttaatgtttttgtattatattatt

SEQ ID NO: 6369 - DNA, 120 bp, synthetic construct
  source 1..120: mol_type = other DNA
caaaaaaacctctcaatccacacctcaatcccaaaaaaatacaaaaaaatcctaaaaattctcaaccacttttcctaactctaaacaaaatttacaacaacctaatcaaacatatattat

SEQ ID NO: 6370 - DNA, 120 bp, synthetic construct
  source 1..120: mol_type = other DNA
tagggagattttttagtttatattttagttttagagaggtgtagaagagttttaaggatttttagttattttttttggttttgggtaaagtttgtagtgatttggttaggtatgtattgt

SEQ ID NO: 6371 - DNA, 120 bp, synthetic construct
  source 1..120: mol_type = other DNA
aaacctctcaatccacacctcaatcccaaaaaaatacaaaaaaatcctaaaaattctctttaaacttcaaccacttttcctaactctaaacaaaatttacaacaacctaatcaaacatat

SEQ ID NO: 6372 - DNA, 120 bp, synthetic construct
  source 1..120: mol_type = other DNA
agattttttagtttatattttagttttagagaggtgtagaagagttttaaggattttttttgagttttagttattttttttggttttgggtaaagtttgtagtgatttggttaggtatgt

SEQ ID NO: 6373 - DNA, 120 bp, synthetic construct
  source 1..120: mol_type = other DNA
caaaaaaacctctcaatccacacctcaatcccaaaaaaatacaaaaaaatcctaaaaattctcaaccacttttcctaactctaaacaaaatttacaacgacctaatcaaacatatattat

SEQ ID NO: 6374 - DNA, 120 bp, synthetic construct
  source 1..120: mol_type = other DNA
tagggagattttttagtttatattttagttttagagaggtgtagaagagttttaaggatttttagttattttttttggttttgggtaaagtttgtagcgatttggttaggtatgtattgt

SEQ ID NO: 6375 - DNA, 120 bp, synthetic construct
  source 1..120: mol_type = other DNA
aaacctctcaatccacacctcaatcccaaaaaaatacaaaaaaatcctaaaaattctctttaaacttcaaccacttttcctaactctaaacaaaatttacaacgacctaatcaaacatat

SEQ ID NO: 6376 - DNA, 120 bp, synthetic construct
  source 1..120: mol_type = other DNA
agattttttagtttatattttagttttagagaggtgtagaagagttttaaggattttttttgagttttagttattttttttggttttgggtaaagtttgtagcgatttggttaggtatgt

SEQ ID NO: 6377 - DNA, 120 bp, synthetic construct
  source 1..120: mol_type = other DNA
tcttaccatataaaaacacaaaatcaaacaaacaaaaacatttccttataacaatatttataaaactaaaaacaatataatatccctccataaaatacacataataaaactatataaacc

SEQ ID NO: 6378 - DNA, 120 bp, synthetic construct
  source 1..120: mol_type = other DNA
ttttgttatatgagaatatagagttagataaataaggatgtttttttgtaataatgtttataagattgaaaataatgtaatgtttttttatgaaatatatataataagattgtgtgagtt

SEQ ID NO: 6379 - DNA, 120 bp, synthetic construct
  source 1..120: mol_type = other DNA
ccatataaaaacacaaaatcaaacaaacaaaaacatttccttataacaatatttataaaaacaaaaaaactaaaaacaatataatatccctccataaaatacacataataaaactatata

SEQ ID NO: 6380 - DNA, 120 bp, synthetic construct
  source 1..120: mol_type = other DNA
ttatatgagaatatagagttagataaataaggatgtttttttgtaataatgtttataagagtaaaaagattgaaaataatgtaatgtttttttatgaaatatatataataagattgtgtg

SEQ ID NO: 6381 - DNA, 120 bp, synthetic construct
  source 1..120: mol_type = other DNA
tcttaccatataaaaacacaaaatcaaacaaacaaaaacgtttccttataacaatatttataaaactaaaaacaatataatatccctccataaaatacacataataaaactatataaacc

SEQ ID NO: 6382 - DNA, 120 bp, synthetic construct
  source 1..120: mol_type = other DNA
ttttgttatatgagaatatagagttagataaataaggacgtttttttgtaataatgtttataagattgaaaataatgtaatgtttttttatgaaatatatataataagattgtgtgagtt

SEQ ID NO: 6383 - DNA, 120 bp, synthetic construct
  source 1..120: mol_type = other DNA
ccatataaaaacacaaaatcaaacaaacaaaaacgtttccttataacaatatttataaaaacaaaaaaactaaaaacaatataatatccctccataaaatacacataataaaactatata

SEQ ID NO: 6384 - DNA, 120 bp, synthetic construct
  source 1..120: mol_type = other DNA
ttatatgagaatatagagttagataaataaggacgtttttttgtaataatgtttataagagtaaaaagattgaaaataatgtaatgtttttttatgaaatatatataataagattgtgtg

SEQ ID NO: 6385 - DNA, 120 bp, synthetic construct
  source 1..120: mol_type = other DNA
aacttttacacaaaaactaacatcaatacctaacacctaaacactaataaatatctaccacaaaataaaaaataaattttatttaattctcaataaccttaaaaaaaccaatttctaatc

SEQ ID NO: 6386 - DNA, 120 bp, synthetic construct
  source 1..120: mol_type = other DNA
agtttttatataagaattgatattagtgtttggtatttaagtattgataaatgtttgttatggggtgaggggtggattttatttagtttttggtgattttggggagattaatttttgatt

SEQ ID NO: 6387 - DNA, 120 bp, synthetic construct
  source 1..120: mol_type = other DNA
tttacacaaaaactaacatcaatacctaacacctaaacactaataaatatctaccacataaaacaaaaataaaaaataaattttatttaattctcaataaccttaaaaaaaccaatttct

SEQ ID NO: 6388 - DNA, 120 bp, synthetic construct
  source 1..120: mol_type = other DNA
tttatataagaattgatattagtgtttggtatttaagtattgataaatgtttgttatgtagggtaggggtgaggggtggattttatttagtttttggtgattttggggagattaattttt

SEQ ID NO: 6389 - DNA, 120 bp, synthetic construct
  source 1..120: mol_type = other DNA
aacttttacacaaaaactaacatcaatacctaacacctaaacactaataaatatctaccacgaaataaaaaataaattttatttaattctcgataaccttaaaaaaaccaatttctaatc

SEQ ID NO: 6390 - DNA, 120 bp, synthetic construct
  source 1..120: mol_type = other DNA
agtttttatataagaattgatattagtgtttggtatttaagtattgataaatgtttgttacggggtgaggggtggattttatttagttttcggtgattttggggagattaatttttgatt

SEQ ID NO: 6391 - DNA, 120 bp, synthetic construct
  source 1..120: mol_type = other DNA
tttacacaaaaactaacatcaatacctaacacctaaacactaataaatatctaccacgtaaaacaaaaataaaaaataaattttatttaattctcgataaccttaaaaaaaccaatttct

SEQ ID NO: 6392 - DNA, 120 bp, synthetic construct
  source 1..120: mol_type = other DNA
tttatataagaattgatattagtgtttggtatttaagtattgataaatgtttgttacgtagggtaggggtgaggggtggattttatttagttttcggtgattttggggagattaattttt

SEQ ID NO: 6393 - DNA, 120 bp, synthetic construct
  source 1..120: mol_type = other DNA
ataaataaatctttaataaaaatttctccattttaaataataataaaatatccttaatacatacctaaacctctctattatttattcatcaaatatccaaaccactaaaaaaaacatatt

SEQ ID NO: 6394 - DNA, 120 bp, synthetic construct
  source 1..120: mol_type = other DNA
atgaataaatttttaataagaatttttttattttaaataataataaaatatttttaatatatgtttaaatttttttgttatttatttattaggtatttaggttattagggaaaatatatt

SEQ ID NO: 6395 - DNA, 120 bp, synthetic construct
  source 1..120: mol_type = other DNA
ttcaataaataaatctttaataaaaatttctccattttaaataataataaaatatccttaataaacctctctattatttattcatcaaatatccaaaccactaaaaaaaacatattttaa

SEQ ID NO: 6396 - DNA, 120 bp, synthetic construct
  source 1..120: mol_type = other DNA
tttaatgaataaatttttaataagaatttttttattttaaataataataaaatatttttaataaatttttttgttatttatttattaggtatttaggttattagggaaaatatattttaa

SEQ ID NO: 6397 - DNA, 120 bp, synthetic construct; identical to SEQ ID NO: 6393
  source 1..120: mol_type = other DNA

SEQ ID NO: 6398 - DNA, 120 bp, synthetic construct; identical to SEQ ID NO: 6394
  source 1..120: mol_type = other DNA

SEQ ID NO: 6399 - DNA, 120 bp, synthetic construct; identical to SEQ ID NO: 6395
  source 1..120: mol_type = other DNA

SEQ ID NO: 6400 - DNA, 120 bp, synthetic construct; identical to SEQ ID NO: 6396
  source 1..120: mol_type = other DNA

SEQ ID NO: 6401 - DNA, 120 bp, synthetic construct
  source 1..120: mol_type = other DNA
tctaaatcaacattatacatactaatacttcaaatactttataaaaacaatttattctatctccaaataaaaaaaataaaataaaattttttatttattttatttaacttttatttttat

SEQ ID NO: 6402 - DNA, 120 bp, synthetic construct
  source 1..120: mol_type = other DNA
tttaaattaatattatgtatgttgatgttttaagtattttatgaaaatagtttattttatttttaagtgaaaaaggtagaataaagttttttgtttgttttatttaatttttatttttgt

SEQ ID NO: 6403 - DNA, 120 bp, synthetic construct
  source 1..120: mol_type = other DNA
atttctaaatcaacattatacatactaatacttcaaatactttataaaaacaatttattctaaataaaaaaaataaaataaaattttttatttattttatttaacttttatttttattat

SEQ ID NO: 6404 - DNA, 120 bp, synthetic construct
  source 1..120: mol_type = other DNA
atttttaaattaatattatgtatgttgatgttttaagtattttatgaaaatagtttattttaagtgaaaaaggtagaataaagttttttgtttgttttatttaatttttatttttgttgt

SEQ ID NO: 6405 - DNA, 120 bp, synthetic construct; identical to SEQ ID NO: 6401
  source 1..120: mol_type = other DNA

SEQ ID NO: 6406 - DNA, 120 bp, synthetic construct; identical to SEQ ID NO: 6402
  source 1..120: mol_type = other DNA

SEQ ID NO: 6407 - DNA, 120 bp, synthetic construct; identical to SEQ ID NO: 6403
  source 1..120: mol_type = other DNA

SEQ ID NO: 6408 - DNA, 120 bp, synthetic construct; identical to SEQ ID NO: 6404
  source 1..120: mol_type = other DNA

SEQ ID NO: 6409 - DNA, 120 bp, synthetic construct
  source 1..120: mol_type = other DNA
actattctattcaacttataattcttataaatactaataactacataaactcaaaacttaaaaatatttataaaataattttaattccaacttatatcaattttatatttactataatca

SEQ ID NO: 6410 - DNA, 120 bp, synthetic construct
  source 1..120: mol_type = other DNA
gttgttttgtttagtttgtaatttttatgaatgttaatagttatatgagtttaaaatttaaaaatatttataaaatgattttagttttaatttatattagttttgtatttattgtggtta

SEQ ID NO: 6411 - DNA, 120 bp, synthetic construct
  source 1..120: mol_type = other DNA
ctttactattctattcaacttataattcttataaatactaataactacataaactcaaaactttataaaataattttaattccaacttatatcaattttatatttactataatcaaaaaa

SEQ ID NO: 6412 - DNA, 120 bp, synthetic construct
  source 1..120: mol_type = other DNA
ttttgttgttttgtttagtttgtaatttttatgaatgttaatagttatatgagtttaaaattttataaaatgattttagttttaatttatattagttttgtatttattgtggttaaggaa

SEQ ID NO: 6413 - DNA, 120 bp, synthetic construct; identical to SEQ ID NO: 6409
  source 1..120: mol_type = other DNA

SEQ ID NO: 6414 - DNA, 120 bp, synthetic construct; identical to SEQ ID NO: 6410
  source 1..120: mol_type = other DNA

SEQ ID NO: 6415 - DNA, 120 bp, synthetic construct; identical to SEQ ID NO: 6411
  source 1..120: mol_type = other DNA

SEQ ID NO: 6416 - DNA, 120 bp, synthetic construct; identical to SEQ ID NO: 6412
  source 1..120: mol_type = other DNA

SEQ ID NO: 6417 - DNA, 120 bp, synthetic construct
  source 1..120: mol_type = other DNA
aaaaaaacaacacatcacaacataacatttttataatcttcctcacataccaacaaccaaaaacccacacatatttctcctcaataaaatttaaaatacataaaactattaaataataac

SEQ ID NO: 6418 - DNA, 120 bp, synthetic construct
  source 1..120: mol_type = other DNA
agaagggtaatatattatagtgtggtgtttttgtaattttttttgtatgttgatagttaggggtttgtgtatgtttttttttggtggggtttaggatgtatggaattgttagatggtgat

SEQ ID NO: 6419 - DNA, 120 bp, synthetic construct
  source 1..120: mol_type = other DNA
aaaacaacacatcacaacataacatttttataatcttcctcacataccaacaaccaaaaacaccaacccacacatatttctcctcaataaaatttaaaatacataaaactattaaataat

SEQ ID NO: 6420 - DNA, 120 bp, synthetic construct
  source 1..120: mol_type = other DNA
agggtaatatattatagtgtggtgtttttgtaattttttttgtatgttgatagttaggagtattggtttgtgtatgtttttttttggtggggtttaggatgtatggaattgttagatggt

SEQ ID NO: 6421 - DNA, 120 bp, synthetic construct
  source 1..120: mol_type = other DNA
aaaaaaacaacacatcacaacgtaacgtttttataatcttcctcgcataccgacaaccaaaaacccgcgcatatttctcctcgataaaatttaaaatacataaaactattaaataataac

SEQ ID NO: 6422 - DNA, 120 bp, synthetic construct
  source 1..120: mol_type = other DNA
agaagggtaatatattatagcgtggcgtttttgtaatttttttcgtatgtcgatagttaggggttcgcgtatgttttttttcggtggggtttaggatgtatggaattgttagatggtgat

SEQ ID NO: 6423 - DNA, 120 bp, synthetic construct
  source 1..120: mol_type = other DNA
aaaacaacacatcacaacgtaacgtttttataatcttcctcgcataccgacaaccaaaaacaccgacccgcgcatatttctcctcgataaaatttaaaatacataaaactattaaataat

SEQ ID NO: 6424 - DNA, 120 bp, synthetic construct
  source 1..120: mol_type = other DNA
agggtaatatattatagcgtggcgtttttgtaatttttttcgtatgtcgatagttaggagtatcggttcgcgtatgttttttttcggtggggtttaggatgtatggaattgttagatggt

SEQ ID NO: 6425 - DNA, 120 bp, synthetic construct
  source 1..120: mol_type = other DNA
cataatttactatcatttactatttttaaataatatatatcctcttatctcccacacccacaacaatctcccttctctaaaataccactaccctcatcacattctaacttccaacattta

SEQ ID NO: 6426 - DNA, 120 bp, synthetic construct
  source 1..120: mol_type = other DNA
tataatttgttattatttgttgtttttaaataatatatgtttttttattttttatatttatagtagttttttttttttgaaatattattgtttttattatattttaatttttaatgtttg

SEQ ID NO: 6427 - DNA, 120 bp, synthetic construct
  source 1..120: mol_type = other DNA
tttactatcatttactatttttaaataatatatatcctcttatctcccacacccacataactaataacaatctcccttctctaaaataccactaccctcatcacattctaacttccaaca

SEQ ID NO: 6428 - DNA, 120 bp, synthetic construct
  source 1..120: mol_type = other DNA
tttgttattatttgttgtttttaaataatatatgtttttttattttttatatttatatgattgatagtagttttttttttttgaaatattattgtttttattatattttaatttttaatg

SEQ ID NO: 6429 - DNA, 120 bp, synthetic construct
  source 1..120: mol_type = other DNA
cataatttactatcatttactatttttaaataatatatatcctcttatctcccacacccacaacaatctcccttctctaaaataccactaccctcatcacattctaacttccaacgttta

SEQ ID NO: 6430 - DNA, 120 bp, synthetic construct
  source 1..120: mol_type = other DNA
tataatttgttattatttgttgtttttaaataatatatgtttttttattttttatatttatagtagttttttttttttgaaatattattgtttttattatattttaatttttaacgtttg

SEQ ID NO: 6431 - DNA, 120 bp, synthetic construct
  source 1..120: mol_type = other DNA
tttactatcatttactatttttaaataatatatatcctcttatctcccacacccacataactaataacaatctcccttctctaaaataccactaccctcatcacattctaacttccaacg

SEQ ID NO: 6432 - DNA, 120 bp, synthetic construct
  source 1..120: mol_type = other DNA
tttgttattatttgttgtttttaaataatatatgtttttttattttttatatttatatgattgatagtagttttttttttttgaaatattattgtttttattatattttaatttttaacg

SEQ ID NO: 6433 - DNA, 120 bp, synthetic construct
  source 1..120: mol_type = other DNA
aaatacaactaaaaataatcaactcatacccaacaaaatacaataacaaaaaaaaataaactaatttaaatacctccaaaaccccatctaaaaaaaaaaaataaacaaacattaccaatc

SEQ ID NO: 6434 - DNA, 120 bp, synthetic construct
  source 1..120: mol_type = other DNA
gggtgtagttgaagatgattagtttatgtttaatagagtgtaatggtaaagaaaagtggattgatttgaatgtttttagagttttatttgggaggagagggtaggtagatattgttaatt

SEQ ID NO: 6435 - DNA, 120 bp, synthetic construct
  source 1..120: mol_type = other DNA
aacttaaatacaactaaaaataatcaactcatacccaacaaaatacaataacaaaaaaaaataaatacctccaaaaccccatctaaaaaaaaaaaataaacaaacattaccaatctaaaa

SEQ ID NO: 6436 - DNA, 120 bp, synthetic construct
  source 1..120: mol_type = other DNA
gatttgggtgtagttgaagatgattagtttatgtttaatagagtgtaatggtaaagaaaagtgaatgtttttagagttttatttgggaggagagggtaggtagatattgttaatttgagg

SEQ ID NO: 6437 - DNA, 120 bp, synthetic construct; identical to SEQ ID NO: 6433
  source 1..120: mol_type = other DNA

SEQ ID NO: 6438 - DNA, 120 bp, synthetic construct; identical to SEQ ID NO: 6434
  source 1..120: mol_type = other DNA

SEQ ID NO: 6439 - DNA, 120 bp, synthetic construct; identical to SEQ ID NO: 6435
  source 1..120: mol_type = other DNA

SEQ ID NO: 6440 - DNA, 120 bp, synthetic construct; identical to SEQ ID NO: 6436
  source 1..120: mol_type = other DNA

SEQ ID NO: 6441 - DNA, 120 bp, synthetic construct
  source 1..120: mol_type = other DNA
aatcaaaataaatttttttcctaaactacaatcatcaaatctcatttcccattaacatacctatttatatttaaaacacaactatttaactctatccatttacataaatcaattaataaa

SEQ ID NO: 6442 - DNA, 120 bp, synthetic construct
  source 1..120: mol_type = other DNA
gattaagatgaattttttttttaaattgtagttattaaattttattttttgttgatgtatttatttatatttgaagtataattgtttaattttgtttatttgtataggttagttaataaa

SEQ ID NO: 6443 - DNA, 120 bp, synthetic construct
  source 1..120: mol_type = other DNA
attaaatcaaaataaatttttttcctaaactacaatcatcaaatctcatttcccattaacatatatttaaaacacaactatttaactctatccatttacataaatcaattaataaacctt

SEQ ID NO: 6444 - DNA, 120 bp, synthetic construct
  source 1..120: mol_type = other DNA
attggattaagatgaattttttttttaaattgtagttattaaattttattttttgttgatgtatatttgaagtataattgtttaattttgtttatttgtataggttagttaataaatttt

SEQ ID NO: 6445 - DNA, 120 bp, synthetic construct
  source 1..120: mol_type = other DNA
aatcaaaataaatttttttcctaaactacaatcatcaaatctcatttcccgttaacgtacctatttatatttaaaacacaactatttaactctatccatttacataaatcaattaataaa

SEQ ID NO: 6446 - DNA, 120 bp, synthetic construct
  source 1..120: mol_type = other DNA
gattaagatgaattttttttttaaattgtagttattaaattttatttttcgttgacgtatttatttatatttgaagtataattgtttaattttgtttatttgtataggttagttaataaa

SEQ ID NO: 6447 - DNA, 120 bp, synthetic construct
  source 1..120: mol_type = other DNA
attaaatcaaaataaatttttttcctaaactacaatcatcaaatctcatttcccgttaacgtatatttaaaacacaactatttaactctatccatttacataaatcaattaataaacctt

SEQ ID NO: 6448 - DNA, 120 bp, synthetic construct
  source 1..120: mol_type = other DNA
attggattaagatgaattttttttttaaattgtagttattaaattttatttttcgttgacgtatatttgaagtataattgtttaattttgtttatttgtataggttagttaataaatttt

SEQ ID NO: 6449 - DNA, 120 bp, synthetic construct
  source 1..120: mol_type = other DNA
aaaaaccctccaatacctcctaaaacacaatttaatttctatcactacctcaaatcaaaaactcactaatacccacaaaatcacatccaaactcttcaacctaacactcattcccttctt

SEQ ID NO: 6450 - DNA, 120 bp, synthetic construct
  source 1..120: mol_type = other DNA
gagggttttttagtattttttgaagtatagtttggtttttgttattattttaaattaagaatttattagtgtttatagggttatatttaggttttttagtttggtatttatttttttttt

SEQ ID NO: 6451 - DNA, 120 bp, synthetic construct
  source 1..120: mol_type = other DNA
ccctccaatacctcctaaaacacaatttaatttctatcactacctcaaatcaaaaactttcaataactcactaatacccacaaaatcacatccaaactcttcaacctaacactcattccc

SEQ ID NO: 6452 - DNA, 120 bp, synthetic construct
  source 1..120: mol_type = other DNA
ttttttagtattttttgaagtatagtttggtttttgttattattttaaattaagaatttttagtggtttattagtgtttatagggttatatttaggttttttagtttggtatttattttt

SEQ ID NO: 6453 - DNA, 120 bp, synthetic construct; identical to SEQ ID NO: 6449
  source 1..120: mol_type = other DNA

SEQ ID NO: 6454 - DNA, 120 bp, synthetic construct; identical to SEQ ID NO: 6450
  source 1..120: mol_type = other DNA

SEQ ID NO: 6455 - DNA, 120 bp, synthetic construct; identical to SEQ ID NO: 6451
  source 1..120: mol_type = other DNA

SEQ ID NO: 6456 - DNA, 120 bp, synthetic construct; identical to SEQ ID NO: 6452
  source 1..120: mol_type = other DNA

SEQ ID NO: 6457 - DNA, 120 bp, synthetic construct
  source 1..120: mol_type = other DNA
actctaaactccaaccaactaacactaccaaaaacccataaaaattcacatataaaccataatttatatatccaaacaacatccacctccatctaacaaccttaataaaccttcaaacca

SEQ ID NO: 6458 - DNA, 120 bp, synthetic construct
  source 1..120: mol_type = other DNA
attttgggttttagttaattgatattgttagggatttatagggatttatatataaattatagtttatatgtttaagtaatatttatttttgtttaatagttttggtgaatttttaggtta

SEQ ID NO: 6459 - DNA, 120 bp, synthetic construct
  source 1..120: mol_type = other DNA
cccactctaaactccaaccaactaacactaccaaaaacccataaaaattcacatataaaccatatatccaaacaacatccacctccatctaacaaccttaataaaccttcaaaccaaaaa

SEQ ID NO: 6460 - DNA, 120 bp, synthetic construct
  source 1..120: mol_type = other DNA
tttattttgggttttagttaattgatattgttagggatttatagggatttatatataaattatatgtttaagtaatatttatttttgtttaatagttttggtgaatttttaggttagggg

SEQ ID NO: 6461 - DNA, 120 bp, synthetic construct
  source 1..120: mol_type = other DNA
actctaaactccaaccaactaacactaccaaaaacccataaaaattcacatataaaccataatttatatatccaaacaacatccacctccgtctaacaaccttaataaaccttcaaacca

SEQ ID NO: 6462 - DNA, 120 bp, synthetic construct
  source 1..120: mol_type = other DNA
attttgggttttagttaattgatattgttagggatttatagggatttatatataaattatagtttatatgtttaagtaatatttattttcgtttaatagttttggtgaatttttaggtta

SEQ ID NO: 6463 - DNA, 120 bp, synthetic construct
  source 1..120: mol_type = other DNA
cccactctaaactccaaccaactaacactaccaaaaacccataaaaattcacatataaaccatatatccaaacaacatccacctccgtctaacaaccttaataaaccttcaaaccaaaaa

SEQ ID NO: 6464 - DNA, 120 bp, synthetic construct
  source 1..120: mol_type = other DNA
tttattttgggttttagttaattgatattgttagggatttatagggatttatatataaattatatgtttaagtaatatttattttcgtttaatagttttggtgaatttttaggttagggg

SEQ ID NO: 6465 - DNA, 120 bp, synthetic construct
  source 1..120: mol_type = other DNA
aaaaatttttcctacttaacaatattcattttatctattaataccataaaacaaaatacaaattaaataaacaatattaataactacaaaacaaaatattacaacacaataaactaaaat

SEQ ID NO: 6466 - DNA, 120 bp, synthetic construct
  source 1..120: mol_type = other DNA
aggagttttttttatttagtagtgtttattttatttattaatgttgtgaagtaaaatataggttgaatgagtagtgttggtaattgtaaaataaagtgttgtaatatagtaggttgaggt

SEQ ID NO: 6467 - DNA, 120 bp, synthetic construct
  source 1..120: mol_type = other DNA
tttttcctacttaacaatattcattttatctattaataccataaaacaaaatacaaatttaaaaaattaaataaacaatattaataactacaaaacaaaatattacaacacaataaacta

SEQ ID NO: 6468 - DNA, 120 bp, synthetic construct
  source 1..120: mol_type = other DNA
ttttttttatttagtagtgtttattttatttattaatgttgtgaagtaaaatataggtttgaaaagttgaatgagtagtgttggtaattgtaaaataaagtgttgtaatatagtaggttg

SEQ ID NO: 6469 - DNA, 120 bp, synthetic construct
  source 1..120: mol_type = other DNA
aaaaatttttcctacttaacaatattcattttatctattaataccgtaaaacaaaatacaaattaaataaacaatattaataactacaaaacaaaatattacaacacaataaactaaaat

SEQ ID NO: 6470 - DNA, 120 bp, synthetic construct
  source 1..120: mol_type = other DNA
aggagttttttttatttagtagtgtttattttatttattaatgtcgtgaagtaaaatataggttgaatgagtagtgttggtaattgtaaaataaagtgttgtaatatagtaggttgaggt

SEQ ID NO: 6471 - DNA, 120 bp, synthetic construct
  source 1..120: mol_type = other DNA
tttttcctacttaacaatattcattttatctattaataccgtaaaacaaaatacaaatttaaaaaattaaataaacaatattaataactacaaaacaaaatattacaacacaataaacta

SEQ ID NO: 6472 - DNA, 120 bp, synthetic construct
  source 1..120: mol_type = other DNA
ttttttttatttagtagtgtttattttatttattaatgtcgtgaagtaaaatataggtttgaaaagttgaatgagtagtgttggtaattgtaaaataaagtgttgtaatatagtaggttg

SEQ ID NO: 6473 - DNA, 120 bp, synthetic construct
  source 1..120: mol_type = other DNA
tataaaactcaaaaattaaacttacaaacataaaaatataaaaaacaataataacaaaataactaaaaataaactcccactaaaaataaaattaaatataaaactaaatccctaatctat

SEQ ID NO: 6474 - DNA, 120 bp, synthetic construct
  source 1..120: mol_type = other DNA
tgtgggatttggggattgagtttgtaggtataggggtgtagaaagtagtggtagtgaggtgattgaaggtggatttttattggggatgggattgagtgtggggttagatttttggtttgt

SEQ ID NO: 6475 - DNA, 120 bp, synthetic construct
  source 1..120: mol_type = other DNA
acttttataaaactcaaaaattaaacttacaaacataaaaatataaaaaacaataataacaaaataaactcccactaaaaataaaattaaatataaaactaaatccctaatctataaaaa

SEQ ID NO: 6476 - DNA, 120 bp, synthetic construct
  source 1..120: mol_type = other DNA
atttttgtgggatttggggattgagtttgtaggtataggggtgtagaaagtagtggtagtgaggtggatttttattggggatgggattgagtgtggggttagatttttggtttgtagaag

SEQ ID NO: 6477 - DNA, 120 bp, synthetic construct
  source 1..120: mol_type = other DNA
tataaaactcgaaaattaaacttacaaacataaaaatataaaaaacaataataacgaaataactaaaaataaactcccactaaaaataaaattaaatataaaactaaatccctaatctat

SEQ ID NO: 6478 - DNA, 120 bp, synthetic construct
  source 1..120: mol_type = other DNA
tgtgggattcggggattgagtttgtaggtataggggtgtagaaagtagtggtagcgaggtgattgaaggtggatttttattggggatgggattgagtgtggggttagatttttggtttgt

SEQ ID NO: 6479 - DNA, 120 bp, synthetic construct
  source 1..120: mol_type = other DNA
acttttataaaactcgaaaattaaacttacaaacataaaaatataaaaaacaataataacgaaataaactcccactaaaaataaaattaaatataaaactaaatccctaatctataaaaa

SEQ ID NO: 6480 - DNA, 120 bp, synthetic construct
  source 1..120: mol_type = other DNA
atttttgtgggattcggggattgagtttgtaggtataggggtgtagaaagtagtggtagcgaggtggatttttattggggatgggattgagtgtggggttagatttttggtttgtagaag

SEQ ID NO: 6481 - DNA, 120 bp, synthetic construct
  source 1..120: mol_type = other DNA
ccaaaatatacactacaaaaaatctacacctaatatataaaactataccccaataactaaaatacacaaaaccataatctcccaacaacccacctattaaatttatatatctcatcacta

SEQ ID NO: 6482 - DNA, 120 bp, synthetic construct
  source 1..120: mol_type = other DNA
ttaggatatatattgtaaaaagtttatatttaatatgtgaggttatgttttaatagttagaatatatagggttatgattttttagtaatttatttgttgaatttgtgtgttttattatta

SEQ ID NO: 6483 - DNA, 120 bp, synthetic construct
  source 1..120: mol_type = other DNA
accccaaaatatacactacaaaaaatctacacctaatatataaaactataccccaataactacaaaaccataatctcccaacaacccacctattaaatttatatatctcatcactaccac

SEQ ID NO: 6484 - DNA, 120 bp, synthetic construct
  source 1..120: mol_type = other DNA
gttttaggatatatattgtaaaaagtttatatttaatatgtgaggttatgttttaatagttatagggttatgattttttagtaatttatttgttgaatttgtgtgttttattattattgt

SEQ ID NO: 6485 - DNA, 120 bp, synthetic construct; identical to SEQ ID NO: 6481
  source 1..120: mol_type = other DNA

SEQ ID NO: 6486 - DNA, 120 bp, synthetic construct; identical to SEQ ID NO: 6482
  source 1..120: mol_type = other DNA

SEQ ID NO: 6487 - DNA, 120 bp, synthetic construct
  source 1..120: mol_type = other DNA
accccaaaatatacactacaaaaaatctacacctaatatataaaactataccccaataactacaaaaccataatctcccaacaacccacctattaaatttatatatctcatcactaccgc

SEQ ID NO: 6488 - DNA, 120 bp, synthetic construct
  source 1..120: mol_type = other DNA
gttttaggatatatattgtaaaaagtttatatttaatatgtgaggttatgttttaatagttatagggttatgattttttagtaatttatttgttgaatttgtgtgttttattattatcgt

SEQ ID NO: 6489 - DNA, 120 bp, synthetic construct
  source 1..120: mol_type = other DNA
aaaaaattcctatatcatacaaaaattaaaaaaacctttctaacaaaataatattcatacaaaaatataaaaaaataaaaaaacaaatcatccccaaacctaaaaaaacaaaattccaaa

SEQ ID NO: 6490 - DNA, 120 bp, synthetic construct
  source 1..120: mol_type = other DNA
ggagggtttttatgttatataggggttggaggagtttttttaatgaggtgatatttgtgtagaaatgtgaagaggtgaaggagtaagttatttttaaatttgggaagataggattttagg

SEQ ID NO: 6491 - DNA, 120 bp, synthetic construct
  source 1..120: mol_type = other DNA
aacaaaaaaaattcctatatcatacaaaaattaaaaaaacctttctaacaaaataatattcataaaaaaataaaaaaacaaatcatccccaaacctaaaaaaacaaaattccaaaaaaaa

SEQ ID NO: 6492 - DNA, 120 bp, synthetic construct
  source 1..120: mol_type = other DNA
agtagggagggtttttatgttatataggggttggaggagtttttttaatgaggtgatatttgtgaagaggtgaaggagtaagttatttttaaatttgggaagataggattttagggaaag

SEQ ID NO: 6493 - DNA, 120 bp, synthetic construct
  source 1..120: mol_type = other DNA
aaaaaattcctatatcatacaaaaattaaaaaaacctttctaacgaaataatattcgtacaaaaatataaaaaaataaaaaaacaaatcatccccaaacctaaaaaaacaaaattccaaa

SEQ ID NO: 6494 - DNA, 120 bp, synthetic construct
  source 1..120: mol_type = other DNA
ggagggtttttatgttatataggggttggaggagtttttttaacgaggtgatattcgtgtagaaatgtgaagaggtgaaggagtaagttatttttaaatttgggaagataggattttagg

SEQ ID NO: 6495 - DNA, 120 bp, synthetic construct
  source 1..120: mol_type = other DNA
aacaaaaaaaattcctatatcatacaaaaattaaaaaaacctttctaacgaaataatattcgtaaaaaaataaaaaaacaaatcatccccaaacctaaaaaaacaaaattccaaaaaaaa

SEQ ID NO: 6496 - DNA, 120 bp, synthetic construct
  source 1..120: mol_type = other DNA
agtagggagggtttttatgttatataggggttggaggagtttttttaacgaggtgatattcgtgaagaggtgaaggagtaagttatttttaaatttgggaagataggattttagggaaag

SEQ ID NO: 6497 - DNA, 120 bp, synthetic construct
  source 1..120: mol_type = other DNA
caaaccaaaacccaaatactaactacctactccccaaataaaacttcctaaactacctctcccaacaccatataccctaaaaaaaaaccaaatccccaatattcccctaaaacccataaa

SEQ ID NO: 6498 - DNA, 120 bp, synthetic construct
  source 1..120: mol_type = other DNA
taggttaaggtttagatgttggttgtttgttttttagatgagattttttgggttgttttttttagtattatgtattttagagagaggttaagtttttagtgtttttttggggtttatgga

SEQ ID NO: 6499 - DNA, 120 bp, synthetic construct
  source 1..120: mol_type = other DNA
caaaacccaaatactaactacctactccccaaataaaacttcctaaactacctctcccaacctaaaccaacaccatataccctaaaaaaaaaccaaatccccaatattcccctaaaaccc

SEQ ID NO: 6500 - DNA, 120 bp, synthetic construct
  source 1..120: mol_type = other DNA
taaggtttagatgttggttgtttgttttttagatgagattttttgggttgttttttttagtttgaattagtattatgtattttagagagaggttaagtttttagtgtttttttggggttt

SEQ ID NO: 6501 - DNA, 120 bp, synthetic construct; identical to SEQ ID NO: 6497
  source 1..120: mol_type = other DNA

SEQ ID NO: 6502 - DNA, 120 bp, synthetic construct; identical to SEQ ID NO: 6498
  source 1..120: mol_type = other DNA

SEQ ID NO: 6503 - DNA, 120 bp, synthetic construct; identical to SEQ ID NO: 6499
  source 1..120: mol_type = other DNA

SEQ ID NO: 6504 - DNA, 120 bp, synthetic construct; identical to SEQ ID NO: 6500
  source 1..120: mol_type = other DNA

SEQ ID NO: 6505 - DNA, 120 bp, synthetic construct
  source 1..120: mol_type = other DNA
caaaatatacaccctttctcaattcctaatctcatatccaatccctactccattctttacttaaaacaatatcaccaaaaacatcctttcttcaattttaccccaaaaaatcaacaattc

SEQ ID NO: 6506 - DNA, 120 bp, synthetic construct
  source 1..120: mol_type = other DNA
taaagtatgtatttttttttaatttttaattttatgtttagtttttgttttattttttatttagaataatattgttgaaggtgttttttttttagttttgttttagaaaattaatagttt

SEQ ID NO: 6507 - DNA, 120 bp, synthetic construct
  source 1..120: mol_type = other DNA
aaacaaaatatacaccctttctcaattcctaatctcatatccaatccctactccattctttacaatatcaccaaaaacatcctttcttcaattttaccccaaaaaatcaacaattcttca

SEQ ID NO: 6508 - DNA, 120 bp, synthetic construct
  source 1..120: mol_type = other DNA
aagtaaagtatgtatttttttttaatttttaattttatgtttagtttttgttttattttttataatattgttgaaggtgttttttttttagttttgttttagaaaattaatagtttttta

SEQ ID NO: 6509 - DNA, 120 bp, synthetic construct
  source 1..120: mol_type = other DNA
caaaatatacaccctttctcaattcctaatctcatatccaatccctactccattctttacttaaaacaatatcgccgaaaacgtcctttcttcaattttaccccaaaaaatcaacaattc

SEQ ID NO: 6510 - DNA, 120 bp, synthetic construct
  source 1..120: mol_type = other DNA
taaagtatgtatttttttttaatttttaattttatgtttagtttttgttttattttttatttagaataatatcgtcgaaggcgttttttttttagttttgttttagaaaattaatagttt

SEQ ID NO: 6511 - DNA, 120 bp, synthetic construct
  source 1..120: mol_type = other DNA
aaacaaaatatacaccctttctcaattcctaatctcatatccaatccctactccattctttacaatatcgccgaaaacgtcctttcttcaattttaccccaaaaaatcaacaattcttca

SEQ ID NO: 6512 - DNA, 120 bp, synthetic construct
  source 1..120: mol_type = other DNA
aagtaaagtatgtatttttttttaatttttaattttatgtttagtttttgttttattttttataatatcgtcgaaggcgttttttttttagttttgttttagaaaattaatagtttttta

SEQ ID NO: 6513 - DNA, 120 bp, synthetic construct
  source 1..120: mol_type = other DNA
acctcccaaaacacaatcatttattaaacaataaactaatactacatcctaaactatatacaatatttcatacaaacatatacactctcataataataataacaaaaaacaaccaaatac

SEQ ID NO: 6514 - DNA, 120 bp, synthetic construct
  source 1..120: mol_type = other DNA
gttttttaaagtatagttatttattaagtagtgaattgatgttgtattttgaattgtatatagtgttttatataagtatatgtatttttgtagtgatagtgataggaggtagttaaatgt

SEQ ID NO: 6515 - DNA, 120 bp, synthetic construct
  source 1..120: mol_type = other DNA
ccaaaacacaatcatttattaaacaataaactaatactacatcctaaactatatacaattttctaaatatttcatacaaacatatacactctcataataataataacaaaaaacaaccaa

SEQ ID NO: 6516 - DNA, 120 bp, synthetic construct
  source 1..120: mol_type = other DNA
ttaaagtatagttatttattaagtagtgaattgatgttgtattttgaattgtatatagttttttaagtgttttatataagtatatgtatttttgtagtgatagtgataggaggtagttaa

SEQ ID NO: 6517 - DNA, 120 bp, synthetic construct
  source 1..120: mol_type = other DNA
acctcccaaaacacaatcatttattaaacaataaactaatactacatcctaaactatatacaatatttcatacaaacatatacactctcgtaataataataacaaaaaacaaccaaatac

SEQ ID NO: 6518 - DNA, 120 bp, synthetic construct
  source 1..120: mol_type = other DNA
gttttttaaagtatagttatttattaagtagtgaattgatgttgtattttgaattgtatatagtgttttatataagtatatgtattttcgtagtgatagtgataggaggtagttaaatgt

SEQ ID NO: 6519 - DNA, 120 bp, synthetic construct
  source 1..120: mol_type = other DNA
ccaaaacacaatcatttattaaacaataaactaatactacatcctaaactatatacaattttctaaatatttcatacaaacatatacactctcgtaataataataacaaaaaacaaccaa

SEQ ID NO: 6520 - DNA, 120 bp, synthetic construct
  source 1..120: mol_type = other DNA
ttaaagtatagttatttattaagtagtgaattgatgttgtattttgaattgtatatagttttttaagtgttttatataagtatatgtattttcgtagtgatagtgataggaggtagttaa

SEQ ID NO: 6521 - DNA, 120 bp, synthetic construct
  source 1..120: mol_type = other DNA
aacataaacataaaataaaaatttctaatatatatatctatatattttcaaacaacaaattcaacacttctaaatacataacataataaaaaaaaaaatctataatcacctctcatatct

SEQ ID NO: 6522 - DNA, 120 bp, synthetic construct
  source 1..120: mol_type = other DNA
aatatgggtatgaagtaaagatttttggtgtgtgtgtttgtgtgtttttaaatggtaggtttagtatttttaagtatatagtatgataggaagagaagtttgtaattattttttatgttt

SEQ ID NO: 6523 - DNA, 120 bp, synthetic construct
  source 1..120: mol_type = other DNA
attaaacataaacataaaataaaaatttctaatatatatatctatatattttcaaacaacaacttctaaatacataacataataaaaaaaaaaatctataatcacctctcatatctaaaa

SEQ ID NO: 6524 - DNA, 120 bp, synthetic construct
  source 1..120: mol_type = other DNA
gttaaatatgggtatgaagtaaagatttttggtgtgtgtgtttgtgtgtttttaaatggtaatttttaagtatatagtatgataggaagagaagtttgtaattattttttatgtttgggg

SEQ ID NO: 6525 - DNA, 120 bp, synthetic construct
  source 1..120: mol_type = other DNA
aacataaacataaaataaaaatttctaatatatatatctatatattttcaaacgacaaattcaacacttctaaatacataacataataaaaaaaaaaatctataatcacctctcatatct

SEQ ID NO: 6526 - DNA, 120 bp, synthetic construct
  source 1..120: mol_type = other DNA
aatatgggtatgaagtaaagatttttggtgtgtgtgtttgtgtgtttttaaacggtaggtttagtatttttaagtatatagtatgataggaagagaagtttgtaattattttttatgttt

SEQ ID NO: 6527 - DNA, 120 bp, synthetic construct
  source 1..120: mol_type = other DNA
attaaacataaacataaaataaaaatttctaatatatatatctatatattttcaaacgacaacttctaaatacataacataataaaaaaaaaaatctataatcacctctcatatctaaaa

SEQ ID NO: 6528 - DNA, 120 bp, synthetic construct
  source 1..120: mol_type = other DNA
gttaaatatgggtatgaagtaaagatttttggtgtgtgtgtttgtgtgtttttaaacggtaatttttaagtatatagtatgataggaagagaagtttgtaattattttttatgtttgggg

SEQ ID NO: 6529 - DNA, 120 bp, synthetic construct
  source 1..120: mol_type = other DNA
caactacaactaccacaaatattactaatccacatattctcttccttcaaaatttaaaaactctttttatatccctcaccacaaacaaatattttaaaatatcccttcataataataata

SEQ ID NO: 6530 - DNA, 120 bp, synthetic construct
  source 1..120: mol_type = other DNA
taattatagttgttataagtattattagtttatgtgttttttttttttaggatttggaggttttttttgtattttttattatgggtaaatattttaaaatgtttttttatgatgatgatg

SEQ ID NO: 6531 - DNA, 120 bp, synthetic construct
  source 1..120: mol_type = other DNA
acaactaccacaaatattactaatccacatattctcttccttcaaaatttaaaaacccattttaaatctttttatatccctcaccacaaacaaatattttaaaatatcccttcataataa

SEQ ID NO: 6532 - DNA, 120 bp, synthetic construct
  source 1..120: mol_type = other DNA
atagttgttataagtattattagtttatgtgttttttttttttaggatttggaggtttattttgaatttttttgtattttttattatgggtaaatattttaaaatgtttttttatgatga

SEQ ID NO: 6533 - DNA, 120 bp, synthetic construct
  source 1..120: mol_type = other DNA
caactacaactaccacaaatattactaatccacgtattctcttccttcaaaatttaaaaactctttttatatccctcaccacgaacaaatattttaaaatatcccttcataataataata

SEQ ID NO: 6534 - DNA, 120 bp, synthetic construct
  source 1..120: mol_type = other DNA
taattatagttgttataagtattattagtttacgtgttttttttttttaggatttggaggttttttttgtattttttattacgggtaaatattttaaaatgtttttttatgatgatgatg

SEQ ID NO: 6535 - DNA, 120 bp, synthetic construct
  source 1..120: mol_type = other DNA
acaactaccacaaatattactaatccacgtattctcttccttcaaaatttaaaaacccattttaaatctttttatatccctcaccacgaacaaatattttaaaatatcccttcataataa

SEQ ID NO: 6536 - DNA, 120 bp, synthetic construct
  source 1..120: mol_type = other DNA
atagttgttataagtattattagtttacgtgttttttttttttaggatttggaggtttattttgaatttttttgtattttttattacgggtaaatattttaaaatgtttttttatgatga

SEQ ID NO: 6537 - DNA, 120 bp, synthetic construct
  source 1..120: mol_type = other DNA
aattctctataaaaaaattttattcctacccttcatcttctactaaccccatacacacttaaaccaaaacttaaatcatcaacaactaaaataaaacaaaaaactatctacctacttact

SEQ ID NO: 6538 - DNA, 120 bp, synthetic construct
  source 1..120: mol_type = other DNA
gattttttgtaaggaggttttatttttgttttttattttttgttggttttatatatatttaggttagaatttgggttattggtagttgggatgaggtagggagttgtttgtttgtttgtt

SEQ ID NO: 6539 - DNA, 120 bp, synthetic construct
  source 1..120: mol_type = other DNA
ctctataaaaaaattttattcctacccttcatcttctactaaccccatacacacttaaacaataaaaccaaaacttaaatcatcaacaactaaaataaaacaaaaaactatctacctact

SEQ ID NO: 6540 - DNA, 120 bp, synthetic construct
  source 1..120: mol_type = other DNA
ttttgtaaggaggttttatttttgttttttattttttgttggttttatatatatttaggtggtggggttagaatttgggttattggtagttgggatgaggtagggagttgtttgtttgtt

SEQ ID NO: 6541 - DNA, 120 bp, synthetic construct
  source 1..120: mol_type = other DNA
aattctctataaaaaaattttattcctacccttcatcttctactaaccccatacacacttaaaccaaaacttaaatcatcgacaactaaaataaaacaaaaaactatctacctacttact

SEQ ID NO: 6542 - DNA, 120 bp, synthetic construct
  source 1..120: mol_type = other DNA
gattttttgtaaggaggttttatttttgttttttattttttgttggttttatatatatttaggttagaatttgggttatcggtagttgggatgaggtagggagttgtttgtttgtttgtt

SEQ ID NO: 6543 - DNA, 120 bp, synthetic construct
  source 1..120: mol_type = other DNA
ctctataaaaaaattttattcctacccttcatcttctactaaccccatacacacttaaacgataaaaccaaaacttaaatcatcgacaactaaaataaaacaaaaaactatctacctact

SEQ ID NO: 6544 - DNA, 120 bp, synthetic construct
  source 1..120: mol_type = other DNA
ttttgtaaggaggttttatttttgttttttattttttgttggttttatatatatttaggcggtggggttagaatttgggttatcggtagttgggatgaggtagggagttgtttgtttgtt

SEQ ID NO: 6545 - DNA, 120 bp, synthetic construct
  source 1..120: mol_type = other DNA
accaaatataaatacataaaaaaaatattttaacatttcaaataataaattaaaatcaaaccttataacactataactaatccaaataactaaactttaaaaaacaaatcttaaccatat

SEQ ID NO: 6546 - DNA, 120 bp, synthetic construct
  source 1..120: mol_type = other DNA
attaaatgtggatgtgtgggaaaagtattttaatattttaaataatagattgaagttagattttgtagtattgtaattggtttaaatgattgagttttgaaagataagttttaattatat

SEQ ID NO: 6547 - DNA, 120 bp, synthetic construct
  source 1..120: mol_type = other DNA
taataccaaatataaatacataaaaaaaatattttaacatttcaaataataaattaaaatcaacactataactaatccaaataactaaactttaaaaaacaaatcttaaccatataaaac

SEQ ID NO: 6548 - DNA, 120 bp, synthetic construct
  source 1..120: mol_type = other DNA
tgatattaaatgtggatgtgtgggaaaagtattttaatattttaaataatagattgaagttagtattgtaattggtttaaatgattgagttttgaaagataagttttaattatatggaat

SEQ ID NO: 6549 - DNA, 120 bp, synthetic construct
  source 1..120: mol_type = other DNA
accaaatataaatacgtaaaaaaaatattttaacatttcaaataataaattaaaatcaaaccttataacactataactaatccaaataactaaactttaaaaaacaaatcttaaccatat

SEQ ID NO: 6550 - DNA, 120 bp, synthetic construct
  source 1..120: mol_type = other DNA
attaaatgtggatgcgtgggaaaagtattttaatattttaaataatagattgaagttagattttgtagtattgtaattggtttaaatgattgagttttgaaagataagttttaattatat

SEQ ID NO: 6551 - DNA, 120 bp, synthetic construct
  source 1..120: mol_type = other DNA
taataccaaatataaatacgtaaaaaaaatattttaacatttcaaataataaattaaaatcaacactataactaatccaaataactaaactttaaaaaacaaatcttaaccatataaaac

SEQ ID NO: 6552 - DNA, 120 bp, synthetic construct
  source 1..120: mol_type = other DNA
tgatattaaatgtggatgcgtgggaaaagtattttaatattttaaataatagattgaagttagtattgtaattggtttaaatgattgagttttgaaagataagttttaattatatggaat

SEQ ID NO: 6553 - DNA, 120 bp, synthetic construct
  source 1..120: mol_type = other DNA
aaaacaataaaaaacataaaaaataaaaaaaaaaactaaacaatcaaataaacaaaacccaaaaaaatctaaattacaccactaaaatacaaaaacaatctctttaaaataccaccatta

SEQ ID NO: 6554 - DNA, 120 bp, synthetic construct
  source 1..120: mol_type = other DNA
aagatagtggggaatatgaagaataaaaagaaaagttaaataattaaatggatagaatttaagggaatttaaattgtattattaaggtgtaagggtaatttttttgggatattattatta

SEQ ID NO: 6555 - DNA, 120 bp, synthetic construct
  source 1..120: mol_type = other DNA
aataaaaaacataaaaaataaaaaaaaaaactaaacaatcaaataaacaaaacccaaataatttcaaaaaatctaaattacaccactaaaatacaaaaacaatctctttaaaataccacc

SEQ ID NO: 6556 - DNA, 120 bp, synthetic construct
  source 1..120: mol_type = other DNA
agtggggaatatgaagaataaaaagaaaagttaaataattaaatggatagaatttaagtaattttagggaatttaaattgtattattaaggtgtaagggtaatttttttgggatattatt

SEQ ID NO: 6557 - DNA, 120 bp, synthetic construct; identical to SEQ ID NO: 6553
  source 1..120: mol_type = other DNA

SEQ ID NO: 6558 - DNA, 120 bp, synthetic construct; identical to SEQ ID NO: 6554
  source 1..120: mol_type = other DNA

SEQ ID NO: 6559 - DNA, 120 bp, synthetic construct; identical to SEQ ID NO: 6555
  source 1..120: mol_type = other DNA

SEQ ID NO: 6560 - DNA, 120 bp, synthetic construct; identical to SEQ ID NO: 6556
  source 1..120: mol_type = other DNA

SEQ ID NO: 6561 - DNA, 120 bp, synthetic construct
  source 1..120: mol_type = other DNA
tacatcatattataaaaacaccacaatactaacaatactaccaattaaaattaacttaaaaacaaataaaaccttactaaaacctaaaaataaaaaattataaataaaataaacctatca

SEQ ID NO: 6562 - DNA, 120 bp, synthetic construct
  source 1..120: mol_type = other DNA
tatattatgttgtagaagtattatagtattagtagtattattaattgaaattggtttgaagataaatgaagttttgttagaatttaagaatagaagattgtaaatgaaataaatttatta

SEQ ID NO: 6563 - DNA, 120 bp, synthetic construct
  source 1..120: mol_type = other DNA
caacatacatcatattataaaaacaccacaatactaacaatactaccaattaaaattaacttaaaaccttactaaaacctaaaaataaaaaattataaataaaataaacctatcactaaa

SEQ ID NO: 6564 - DNA, 120 bp, synthetic construct
  source 1..120: mol_type = other DNA
tagtatatattatgttgtagaagtattatagtattagtagtattattaattgaaattggtttgaagttttgttagaatttaagaatagaagattgtaaatgaaataaatttattattgaa

SEQ ID NO: 6565 - DNA, 120 bp, synthetic construct; identical to SEQ ID NO: 6561
  source 1..120: mol_type = other DNA

SEQ ID NO: 6566 - DNA, 120 bp, synthetic construct; identical to SEQ ID NO: 6562
  source 1..120: mol_type = other DNA

SEQ ID NO: 6567 - DNA, 120 bp, synthetic construct; identical to SEQ ID NO: 6563
  source 1..120: mol_type = other DNA

SEQ ID NO: 6568 - DNA, 120 bp, synthetic construct; identical to SEQ ID NO: 6564
  source 1..120: mol_type = other DNA

SEQ ID NO: 6569 - DNA, 120 bp, synthetic construct
  source 1..120: mol_type = other DNA
ttcccataataaatctcctctcctctctctcaataaaaaaatatacatatttaattcataaaaaaacatatatatatatttccttataaattaaaatttcaatcatctattaaaactaat

SEQ ID NO: 6570 - DNA, 120 bp, synthetic construct
  source 1..120: mol_type = other DNA
tttttataataaattttttttttttttttttaataggagaatatatatatttaatttataaggaaatatatatatatgtttttttgtgaattaaaattttaattatttgttgaaattaat

SEQ ID NO: 6571 - DNA, 120 bp, synthetic construct
  source 1..120: mol_type = other DNA
ataaattcccataataaatctcctctcctctctctcaataaaaaaatatacatatttaattcatatatatatatttccttataaattaaaatttcaatcatctattaaaactaatcaata

SEQ ID NO: 6572 - DNA, 120 bp, synthetic construct
  source 1..120: mol_type = other DNA
ataaatttttataataaattttttttttttttttttaataggagaatatatatatttaatttatatatatatgtttttttgtgaattaaaattttaattatttgttgaaattaattagta

SEQ ID NO: 6573 - DNA, 120 bp, synthetic construct; identical to SEQ ID NO: 6569
  source 1..120: mol_type = other DNA

SEQ ID NO: 6574 - DNA, 120 bp, synthetic construct; identical to SEQ ID NO: 6570
  source 1..120: mol_type = other DNA

SEQ ID NO: 6575 - DNA, 120 bp, synthetic construct; identical to SEQ ID NO: 6571
  source 1..120: mol_type = other DNA

SEQ ID NO: 6576 - DNA, 120 bp, synthetic construct; identical to SEQ ID NO: 6572
  source 1..120: mol_type = other DNA

SEQ ID NO: 6577 - DNA, 120 bp, synthetic construct
  source 1..120: mol_type = other DNA
ctaaatactttttaaaaacacttaactctcatttaaccctacttaaaataaaaaaaaatatatttaaataaaaaattaatccaccttcttaatatctcaatctattttttaattttatct

SEQ ID NO: 6578 - DNA, 120 bp, synthetic construct
  source 1..120: mol_type = other DNA
ttaaatgttttttagaggtatttaatttttatttagttttgtttaagatgaaaaaaagtgtatttaaataaaaaattagtttatttttttaatattttaatttattttttaattttattt

SEQ ID NO: 6579 - DNA, 120 bp, synthetic construct
  source 1..120: mol_type = other DNA
tttctaaatactttttaaaaacacttaactctcatttaaccctacttaaaataaaaaaaaataaataaaaaattaatccaccttcttaatatctcaatctattttttaattttatctata

SEQ ID NO: 6580 - DNA, 120 bp, synthetic construct
  source 1..120: mol_type = other DNA
tttttaaatgttttttagaggtatttaatttttatttagttttgtttaagatgaaaaaaagtaaataaaaaattagtttatttttttaatattttaatttattttttaattttatttgta

SEQ ID NO: 6581 - DNA, 120 bp, synthetic construct; identical to SEQ ID NO: 6577
  source 1..120: mol_type = other DNA

SEQ ID NO: 6582 - DNA, 120 bp, synthetic construct; identical to SEQ ID NO: 6578
  source 1..120: mol_type = other DNA

SEQ ID NO: 6583 - DNA, 120 bp, synthetic construct; identical to SEQ ID NO: 6579
  source 1..120: mol_type = other DNA

SEQ ID NO: 6584 - DNA, 120 bp, synthetic construct; identical to SEQ ID NO: 6580
  source 1..120: mol_type = other DNA

SEQ ID NO: 6585 - DNA, 120 bp, synthetic construct
  source 1..120: mol_type = other DNA
ccaaataaaaaatactcattaaccttaatatccccaaaatacaaaaaattacattttataaaactaataaaaaatttaaaaataatttttcattatttttctctatttaattaatataat

SEQ ID NO: 6586 - DNA, 120 bp, synthetic construct
  source 1..120: mol_type = other DNA
ttaggtggaaggtgtttgttagttttgatgtttttagagtgtaaaggattgtattttataaaattaataaaggatttaaaggtaattttttattatttttttttatttaattgatataat

SEQ ID NO: 6587 - DNA, 120 bp, synthetic construct
  source 1..120: mol_type = other DNA
taaaaccaaataaaaaatactcattaaccttaatatccccaaaatacaaaaaattacatttataaaaaatttaaaaataatttttcattatttttctctatttaattaatataatcactt

SEQ ID NO: 6588 - DNA, 120 bp, synthetic construct
  source 1..120: mol_type = other DNA
tagggttaggtggaaggtgtttgttagttttgatgtttttagagtgtaaaggattgtatttataaaggatttaaaggtaattttttattatttttttttatttaattgatataattattt

SEQ ID NO: 6589 - DNA, 120 bp, synthetic construct
  source 1..120: mol_type = other DNA
ccaaataaaaaatactcgttaaccttaatatccccaaaatacaaaaaattacattttataaaactaataaaaaatttaaaaataatttttcattatttttctctatttaattaatataat

SEQ ID NO: 6590 - DNA, 120 bp, synthetic construct
  source 1..120: mol_type = other DNA
ttaggtggaaggtgttcgttagttttgatgtttttagagtgtaaaggattgtattttataaaattaataaaggatttaaaggtaattttttattatttttttttatttaattgatataat

SEQ ID NO: 6591 - DNA, 120 bp, synthetic construct
  source 1..120: mol_type = other DNA
taaaaccaaataaaaaatactcgttaaccttaatatccccaaaatacaaaaaattacatttataaaaaatttaaaaataatttttcattatttttctctatttaattaatataatcactt

SEQ ID NO: 6592 - DNA, 120 bp, synthetic construct
  source 1..120: mol_type = other DNA
tagggttaggtggaaggtgttcgttagttttgatgtttttagagtgtaaaggattgtatttataaaggatttaaaggtaattttttattatttttttttatttaattgatataattattt

SEQ ID NO: 6593 - DNA, 120 bp, synthetic construct
  source 1..120: mol_type = other DNA
tactttaaattcttttaaataacaacaaaatacaaaaacaatacaaaaataaaaacctttccaaatcaaatataataatccatataaataaaatacaaataatatataaacatactttat

SEQ ID NO: 6594 - DNA, 120 bp, synthetic construct
  source 1..120: mol_type = other DNA
tgttttagatttttttggatgatagtaagatgtaaaaataatgtagaggtgagaatttttttagattaaatataataatttatgtgaatgaaatataagtagtatatgaatatattttat

SEQ ID NO: 6595 - DNA, 120 bp, synthetic construct
  source 1..120: mol_type = other DNA
aatatactttaaattcttttaaataacaacaaaatacaaaaacaatacaaaaataaaaacctcaaatataataatccatataaataaaatacaaataatatataaacatactttatttta

SEQ ID NO: 6596 - DNA, 120 bp, synthetic construct
  source 1..120: mol_type = other DNA
aatgtgttttagatttttttggatgatagtaagatgtaaaaataatgtagaggtgagaattttaaatataataatttatgtgaatgaaatataagtagtatatgaatatattttatttta

SEQ ID NO: 6597 - DNA, 120 bp, synthetic construct; identical to SEQ ID NO: 6593
  source 1..120: mol_type = other DNA

SEQ ID NO: 6598 - DNA, 120 bp, synthetic construct; identical to SEQ ID NO: 6594
  source 1..120: mol_type = other DNA

SEQ ID NO: 6599 - DNA, 120 bp, synthetic construct; identical to SEQ ID NO: 6595
  source 1..120: mol_type = other DNA

SEQ ID NO: 6600 - DNA, 120 bp, synthetic construct; identical to SEQ ID NO: 6596
  source 1..120: mol_type = other DNA

SEQ ID NO: 6601 - DNA, 120 bp, synthetic construct
  source 1..120: mol_type = other DNA
aaaacacttataactaaaaattaaaaaaaacaataaaaatatataaaaaaattattattttataaaattttatacataatcattatacactttataaaataaaaacacaaaaaaactctt

SEQ ID NO: 6602 - DNA, 120 bp, synthetic construct
  source 1..120: mol_type = other DNA
aaaatatttatggttagaaattgagagggataataggggtatataaaaaaattattgttttgtgagattttgtgtataattattgtatattttataaaatgaaaatatagaagaattttt

SEQ ID NO: 6603 - DNA, 120 bp, synthetic construct
  source 1..120: mol_type = other DNA
ctataaaaacacttataactaaaaattaaaaaaaacaataaaaatatataaaaaaattattattttatacataatcattatacactttataaaataaaaacacaaaaaaactcttaccat

SEQ ID NO: 6604 - DNA, 120 bp, synthetic construct
  source 1..120: mol_type = other DNA
ttgtaaaaatatttatggttagaaattgagagggataataggggtatataaaaaaattattattttgtgtataattattgtatattttataaaatgaaaatatagaagaatttttgttgt

SEQ ID NO: 6605 - DNA, 120 bp, synthetic construct; identical to SEQ ID NO: 6601
  source 1..120: mol_type = other DNA

SEQ ID NO: 6606 - DNA, 120 bp, synthetic construct; identical to SEQ ID NO: 6602
  source 1..120: mol_type = other DNA

SEQ ID NO: 6607 - DNA, 120 bp, synthetic construct
  source 1..120: mol_type = other DNA
ctataaaaacacttataactaaaaattaaaaaaaacaataaaaatatataaaaaaattattattttatacataatcattatacactttataaaataaaaacacaaaaaaactcttaccgt

SEQ ID NO: 6608 - DNA, 120 bp, synthetic construct
  source 1..120: mol_type = other DNA
ttgtaaaaatatttatggttagaaattgagagggataataggggtatataaaaaaattattattttgtgtataattattgtatattttataaaatgaaaatatagaagaatttttgtcgt

SEQ ID NO: 6609 - DNA, 120 bp, synthetic construct
  source 1..120: mol_type = other DNA
tattcaaaactattataccaaaatatctactttattatctaaaaacctaaaaacaaattccctatttactcatatttacatacataaaaactctataaacactaaaatattcaaattttt

SEQ ID NO: 6610 - DNA, 120 bp, synthetic construct
  source 1..120: mol_type = other DNA
tatttaaaattattatattaaaatatttgttttattatttaggaatttgaaagtgaattttttgtttgtttatgtttatatatatggaagttttgtgaatattgggatatttaaattttt

SEQ ID NO: 6611 - DNA, 120 bp, synthetic construct
  source 1..120: mol_type = other DNA
ttcttattcaaaactattataccaaaatatctactttattatctaaaaacctaaaaacaaattactcatatttacatacataaaaactctataaacactaaaatattcaaatttttacct

SEQ ID NO: 6612 - DNA, 120 bp, synthetic construct
  source 1..120: mol_type = other DNA
tttttatttaaaattattatattaaaatatttgttttattatttaggaatttgaaagtgaattgtttatgtttatatatatggaagttttgtgaatattgggatatttaaatttttattt

SEQ ID NO: 6613 - DNA, 120 bp, synthetic construct
  source 1..120: mol_type = other DNA
tattcaaaactattataccaaaatatctactttattatctaaaaacctaaaaacgaattccctatttactcatatttacatacataaaaactctataaacactaaaatattcaaattttt

SEQ ID NO: 6614 - DNA, 120 bp, synthetic construct
  source 1..120: mol_type = other DNA
tatttaaaattattatattaaaatatttgttttattatttaggaatttgaaagcgaattttttgtttgtttatgtttatatatatggaagttttgtgaatattgggatatttaaattttt

SEQ ID NO: 6615 - DNA, 120 bp, synthetic construct
  source 1..120: mol_type = other DNA
ttcttattcaaaactattataccaaaatatctactttattatctaaaaacctaaaaacgaattactcatatttacatacataaaaactctataaacactaaaatattcaaatttttacct

SEQ ID NO: 6616 - DNA, 120 bp, synthetic construct
  source 1..120: mol_type = other DNA
tttttatttaaaattattatattaaaatatttgttttattatttaggaatttgaaagcgaattgtttatgtttatatatatggaagttttgtgaatattgggatatttaaatttttattt

SEQ ID NO: 6617 - DNA, 120 bp, synthetic construct
  source 1..120: mol_type = other DNA
taccaaaaacttaataaatattaactataactattacataatatcaaataaaaacactaattatataatatacatatactacataatctcattataaataaaaatattcattataaataa

SEQ ID NO: 6618 - DNA, 120 bp, synthetic construct
  source 1..120: mol_type = other DNA
tgttgagggtttaataaatgttgattatgattattatatggtattaaatgaaaatattaattgtgtaatatgtatgtattatataattttattataagtaaaaatatttattatgagtaa

SEQ ID NO: 6619 - DNA, 120 bp, synthetic construct
  source 1..120: mol_type = other DNA
acacataccaaaaacttaataaatattaactataactattacataatatcaaataaaaacaaatatacatatactacataatctcattataaataaaaatattcattataaataattaca

SEQ ID NO: 6620 - DNA, 120 bp, synthetic construct
  source 1..120: mol_type = other DNA
gtatatgttgagggtttaataaatgttgattatgattattatatggtattaaatgaaaataaatatgtatgtattatataattttattataagtaaaaatatttattatgagtaattata

SEQ ID NO: 6621 - DNA, 120 bp, synthetic construct
  source 1..120: mol_type = other DNA
taccgaaaacttaataaatattaactataactattacataatatcaaataaaaacactaattatataatatacatatactacataatctcattataaataaaaatattcattataaataa

SEQ ID NO: 6622 - DNA, 120 bp, synthetic construct
  source 1..120: mol_type = other DNA
tgtcgagggtttaataaatgttgattatgattattatatggtattaaatgaaaatattaattgtgtaatatgtatgtattatataattttattataagtaaaaatatttattatgagtaa

SEQ ID NO: 6623 - DNA, 120 bp, synthetic construct
  source 1..120: mol_type = other DNA
acacataccgaaaacttaataaatattaactataactattacataatatcaaataaaaacaaatatacatatactacataatctcattataaataaaaatattcattataaataattaca

SEQ ID NO: 6624 - DNA, 120 bp, synthetic construct
  source 1..120: mol_type = other DNA
gtatatgtcgagggtttaataaatgttgattatgattattatatggtattaaatgaaaataaatatgtatgtattatataattttattataagtaaaaatatttattatgagtaattata

SEQ ID NO: 6625 - DNA, 120 bp, synthetic construct
  source 1..120: mol_type = other DNA
acaaaataaaattccttaaaaaaccataaaaaacaataaaaatcttcccaaaaaacaaattaaaaaaacttattactctaccaaaaaatctctaccactcctatccaacaaaattttata

SEQ ID NO: 6626 - DNA, 120 bp, synthetic construct
  source 1..120: mol_type = other DNA
ataaggtaagattttttgaaagattataaaggataatgaaaatttttttaaagagtagattaaaaggatttattattttgttagggagtttttgttatttttatttagtaggattttatg

SEQ ID NO: 6627 - DNA, 120 bp, synthetic construct
  source 1..120: mol_type = other DNA
ataaacaaaataaaattccttaaaaaaccataaaaaacaataaaaatcttcccaaaaaacaaacttattactctaccaaaaaatctctaccactcctatccaacaaaattttataatcaa

SEQ ID NO: 6628 - DNA, 120 bp, synthetic construct
  source 1..120: mol_type = other DNA
gtggataaggtaagattttttgaaagattataaaggataatgaaaatttttttaaagagtagatttattattttgttagggagtttttgttatttttatttagtaggattttatgattaa

SEQ ID NO: 6629 - DNA, 120 bp, synthetic construct; identical to SEQ ID NO: 6625
  source 1..120: mol_type = other DNA

SEQ ID NO: 6630 - DNA, 120 bp, synthetic construct; identical to SEQ ID NO: 6626
  source 1..120: mol_type = other DNA

SEQ ID NO: 6631 - DNA, 120 bp, synthetic construct; identical to SEQ ID NO: 6627
  source 1..120: mol_type = other DNA

SEQ ID NO: 6632 - DNA, 120 bp, synthetic construct; identical to SEQ ID NO: 6628
  source 1..120: mol_type = other DNA

SEQ ID NO: 6633 - DNA, 120 bp, synthetic construct
  source 1..120: mol_type = other DNA
aaaaatcactaacaacctctcaacaaacccctccccaacaatataatcctaaacccaaaaacttaaataatacccacacaacacttaaaaacaaatctaacccaaccccactacaccaca

SEQ ID NO: 6634 - DNA, 120 bp, synthetic construct
  source 1..120: mol_type = other DNA
gaaaattattgatgattttttggtaagtttttttttagtggtgtgattttggatttaagggtttgggtgatgtttatataatatttaaggataggtttgatttgattttattatattata

SEQ ID NO: 6635 - DNA, 120 bp, synthetic construct
  source 1..120: mol_type = other DNA
caaaaaaatcactaacaacctctcaacaaacccctccccaacaatataatcctaaacccaaaataatacccacacaacacttaaaaacaaatctaacccaaccccactacaccacaccta

SEQ ID NO: 6636 - DNA, 120 bp, synthetic construct
  source 1..120: mol_type = other DNA
taagaaaattattgatgattttttggtaagtttttttttagtggtgtgattttggatttaaggtgatgtttatataatatttaaggataggtttgatttgattttattatattatattta

SEQ ID NO: 6637 - DNA, 120 bp, synthetic construct
  source 1..120: mol_type = other DNA
aaaaatcactaacgacctctcgacaaacccctccccaacgatataatcctaaacccaaaaacttaaataatacccacacaacacttaaaaacaaatctaacccgaccccactacaccaca

SEQ ID NO: 6638 - DNA, 120 bp, synthetic construct
  source 1..120: mol_type = other DNA
gaaaattattgacgatttttcggtaagtttttttttagcggtgtgattttggatttaagggtttgggtgatgtttatataatatttaaggataggtttgattcgattttattatattata

SEQ ID NO: 6639 - DNA, 120 bp, synthetic construct
  source 1..120: mol_type = other DNA
caaaaaaatcactaacgacctctcgacaaacccctccccaacgatataatcctaaacccaaaataatacccacacaacacttaaaaacaaatctaacccgaccccactacaccacaccta

SEQ ID NO: 6640 - DNA, 120 bp, synthetic construct
  source 1..120: mol_type = other DNA
taagaaaattattgacgatttttcggtaagtttttttttagcggtgtgattttggatttaaggtgatgtttatataatatttaaggataggtttgattcgattttattatattatattta

SEQ ID NO: 6641 - DNA, 120 bp, synthetic construct
  source 1..120: mol_type = other DNA
cataaaaaaaacatattcttaaataaatttaaataaatttatttctcaaaacttctttaactaaaattattcacaccaaactccctatatcaacaacaattaaaattaaactaaaaacaa

SEQ ID NO: 6642 - DNA, 120 bp, synthetic construct
  source 1..120: mol_type = other DNA
tatgaaaagagtatatttttgggtaaatttaaataaatttattttttaaaatttttttgattgaagttgtttatattagattttttatattaataataattaaagttgaattgaaagtaa

SEQ ID NO: 6643 - DNA, 120 bp, synthetic construct
  source 1..120: mol_type = other DNA
atcaccataaaaaaaacatattcttaaataaatttaaataaatttatttctcaaaacttctttattcacaccaaactccctatatcaacaacaattaaaattaaactaaaaacaaacata

SEQ ID NO: 6644 - DNA, 120 bp, synthetic construct
  source 1..120: mol_type = other DNA
attattatgaaaagagtatatttttgggtaaatttaaataaatttattttttaaaatttttttgtttatattagattttttatattaataataattaaagttgaattgaaagtaaatatg

SEQ ID NO: 6645 - DNA, 120 bp, synthetic construct; identical to SEQ ID NO: 6641
  source 1..120: mol_type = other DNA

SEQ ID NO: 6646 - DNA, 120 bp, synthetic construct; identical to SEQ ID NO: 6642
  source 1..120: mol_type = other DNA

SEQ ID NO: 6647 - DNA, 120 bp, synthetic construct; identical to SEQ ID NO: 6643
  source 1..120: mol_type = other DNA

SEQ ID NO: 6648 - DNA, 120 bp, synthetic construct; identical to SEQ ID NO: 6644
  source 1..120: mol_type = other DNA

SEQ ID NO: 6649 - DNA, 120 bp, synthetic construct
  source 1..120: mol_type = other DNA
atataattatatctctcaataccattaatttccatttatccattactaataatactaaacatctattcatatactttttactataattatctctaccttaataaaatattcattcaaata

SEQ ID NO: 6650 - DNA, 120 bp, synthetic construct
  source 1..120: mol_type = other DNA
atatagttgtattttttagtattattaatttttatttatttattgttaatgatgttgaatgtttatttatgtgttttttgttataattatttttattttggtaaaatgtttatttaagta

SEQ ID NO: 6651 - DNA, 120 bp, synthetic construct
  source 1..120: mol_type = other DNA
tatatataattatatctctcaataccattaatttccatttatccattactaataatactaaattcatatactttttactataattatctctaccttaataaaatattcattcaaatattt

SEQ ID NO: 6652 - DNA, 120 bp, synthetic construct
  source 1..120: mol_type = other DNA
tgtatatagttgtattttttagtattattaatttttatttatttattgttaatgatgttgaatttatgtgttttttgttataattatttttattttggtaaaatgtttatttaagtattt

SEQ ID NO: 6653 - DNA, 120 bp, synthetic construct
  source 1..120: mol_type = other DNA
atataattatatctctcaataccattaatttccatttatccattactaataatactaaacgtctattcatatactttttactataattatctctaccttaataaaatattcattcaaata

SEQ ID NO: 6654 - DNA, 120 bp, synthetic construct
  source 1..120: mol_type = other DNA
atatagttgtattttttagtattattaatttttatttatttattgttaatgatgttgaacgtttatttatgtgttttttgttataattatttttattttggtaaaatgtttatttaagta

SEQ ID NO: 6655 - DNA, 120 bp, synthetic construct; identical to SEQ ID NO: 6651
  source 1..120: mol_type = other DNA

SEQ ID NO: 6656 - DNA, 120 bp, synthetic construct; identical to SEQ ID NO: 6652
  source 1..120: mol_type = other DNA

SEQ ID NO: 6657 - DNA, 120 bp, synthetic construct
  source 1..120: mol_type = other DNA
aaaccttaaaaataataaaaaaaaaaaaaaatccttattcttaccctaataaataaaatccaaacccaatcctccctaatatctatatactaaacctaatctttaaatacaatatccctc

SEQ ID NO: 6658 - DNA, 120 bp, synthetic construct
  source 1..120: mol_type = other DNA
aggttttggggatagtggaaaaaagggaaggtttttgtttttattttagtggatgagatttaggtttagttttttttaatgtttgtatattgggtttaatttttggatgtagtatttttt

SEQ ID NO: 6659 - DNA, 120 bp, synthetic construct
  source 1..120: mol_type = other DNA
ttaaaaataataaaaaaaaaaaaaaatccttattcttaccctaataaataaaatccaattaatataaacccaatcctccctaatatctatatactaaacctaatctttaaatacaatatc

SEQ ID NO: 6660 - DNA, 120 bp, synthetic construct
  source 1..120: mol_type = other DNA
ttggggatagtggaaaaaagggaaggtttttgtttttattttagtggatgagatttagttgatataggtttagttttttttaatgtttgtatattgggtttaatttttggatgtagtatt

SEQ ID NO: 6661 - DNA, 120 bp, synthetic construct; identical to SEQ ID NO: 6657
  source 1..120: mol_type = other DNA

SEQ ID NO: 6662 - DNA, 120 bp, synthetic construct; identical to SEQ ID NO: 6658
  source 1..120: mol_type = other DNA

SEQ ID NO: 6663 - DNA, 120 bp, synthetic construct; identical to SEQ ID NO: 6659
  source 1..120: mol_type = other DNA

SEQ ID NO: 6664 - DNA, 120 bp, synthetic construct; identical to SEQ ID NO: 6660
  source 1..120: mol_type = other DNA

SEQ ID NO: 6665 - DNA, 120 bp, synthetic construct
  source 1..120: mol_type = other DNA
ccttaccttctttcacctattaaacaaaatatatccttccatcataatttaaaaatcctcatctttcattataaatcttcccaaatatttttaacaaaaaaaaataatacaaaaaataaa

SEQ ID NO: 6666 - DNA, 120 bp, synthetic construct
  source 1..120: mol_type = other DNA
ttttatttttttttgtttattaggtaaaatatgtttttttgttatgatttaaaggtttttattttttattgtaaatttttttaaatatttttggtaaagagaggtaatatggggaataaa

SEQ ID NO: 6667 - DNA, 120 bp, synthetic construct
  source 1..120: mol_type = other DNA
ccttctttcacctattaaacaaaatatatccttccatcataatttaaaaatcctcatctctatactctttcattataaatcttcccaaatatttttaacaaaaaaaaataatacaaaaaa

SEQ ID NO: 6668 - DNA, 120 bp, synthetic construct
  source 1..120: mol_type = other DNA
tttttttttgtttattaggtaaaatatgtttttttgttatgatttaaaggtttttatttttatgtttttttattgtaaatttttttaaatatttttggtaaagagaggtaatatggggaa

SEQ ID NO: 6669 - DNA, 120 bp, synthetic construct
  source 1..120: mol_type = other DNA
ccttaccttctttcgcctattaaacaaaatatatccttccgtcataatttaaaaatcctcatctttcattataaatcttcccaaatatttttaacaaaaaaaaataatacgaaaaataaa

SEQ ID NO: 6670 - DNA, 120 bp, synthetic construct
  source 1..120: mol_type = other DNA
ttttattttttttcgtttattaggtaaaatatgttttttcgttatgatttaaaggtttttattttttattgtaaatttttttaaatatttttggtaaagagaggtaatacggggaataaa

SEQ ID NO: 6671 - DNA, 120 bp, synthetic construct
  source 1..120: mol_type = other DNA
ccttctttcgcctattaaacaaaatatatccttccgtcataatttaaaaatcctcatctctatactctttcattataaatcttcccaaatatttttaacaaaaaaaaataatacgaaaaa

SEQ ID NO: 6672 - DNA, 120 bp, synthetic construct
  source 1..120: mol_type = other DNA
ttttttttcgtttattaggtaaaatatgttttttcgttatgatttaaaggtttttatttttatgtttttttattgtaaatttttttaaatatttttggtaaagagaggtaatacggggaa

SEQ ID NO: 6673 - DNA, 120 bp, synthetic construct
  source 1..120: mol_type = other DNA
caatacccaacttatcccaccctcttctctccaatacccaaaccaacaataatactataaataaaataaaatactaatcacactaaaacacaaccctaccttccaaccaacaacttcaaa

SEQ ID NO: 6674 - DNA, 120 bp, synthetic construct
  source 1..120: mol_type = other DNA
tagtatttagtttattttatttttttttttttagtatttaagttagtaatgatgttgtgaataagatgaaatattaattgtattggagtatagttttgttttttagttagtaattttggg

SEQ ID NO: 6675 - DNA, 120 bp, synthetic construct
  source 1..120: mol_type = other DNA
tccacaatacccaacttatcccaccctcttctctccaatacccaaaccaacaataatactataaaatactaatcacactaaaacacaaccctaccttccaaccaacaacttcaaaacaaa

SEQ ID NO: 6676 - DNA, 120 bp, synthetic construct
  source 1..120: mol_type = other DNA
tttatagtatttagtttattttatttttttttttttagtatttaagttagtaatgatgttgtgaaatattaattgtattggagtatagttttgttttttagttagtaattttggggtaga

SEQ ID NO: 6677 - DNA, 120 bp, synthetic construct
  source 1..120: mol_type = other DNA
caatacccaacttatcccaccctcttctctccaatacccaaaccaacaataatactataaataaaataaaatactaatcgcactaaaacacaaccctaccttccaaccaacaacttcgaa

SEQ ID NO: 6678 - DNA, 120 bp, synthetic construct
  source 1..120: mol_type = other DNA
tagtatttagtttattttatttttttttttttagtatttaagttagtaatgatgttgtgaataagatgaaatattaatcgtattggagtatagttttgttttttagttagtaatttcggg

SEQ ID NO: 6679 - DNA, 120 bp, synthetic construct
  source 1..120: mol_type = other DNA
tccacaatacccaacttatcccaccctcttctctccaatacccaaaccaacaataatactataaaatactaatcgcactaaaacacaaccctaccttccaaccaacaacttcgaaacaaa

SEQ ID NO: 6680 - DNA, 120 bp, synthetic construct
  source 1..120: mol_type = other DNA
tttatagtatttagtttattttatttttttttttttagtatttaagttagtaatgatgttgtgaaatattaatcgtattggagtatagttttgttttttagttagtaatttcggggtaga

SEQ ID NO: 6681 - DNA, 120 bp, synthetic construct
  source 1..120: mol_type = other DNA
aactttctacttcaaaatatcacatactaaattccatatatcaacaaaacaacaatcctttaacttcccaaaaattacctaaaaaaaaatccacttccatacttattcatataattataa

SEQ ID NO: 6682 - DNA, 120 bp, synthetic construct
  source 1..120: mol_type = other DNA
gattttttgttttaaagtgttatatgttgaattttatgtgttagtagggtagtagttttttgattttttaaggattatttggggaaggatttatttttatgtttatttatgtgattgtag

SEQ ID NO: 6683 - DNA, 120 bp, synthetic construct
  source 1..120: mol_type = other DNA
ctaaactttctacttcaaaatatcacatactaaattccatatatcaacaaaacaacaatcctcccaaaaattacctaaaaaaaaatccacttccatacttattcatataattataacaaa

SEQ ID NO: 6684 - DNA, 120 bp, synthetic construct
  source 1..120: mol_type = other DNA
ttggattttttgttttaaagtgttatatgttgaattttatgtgttagtagggtagtagtttttttaaggattatttggggaaggatttatttttatgtttatttatgtgattgtagtaga

SEQ ID NO: 6685 - DNA, 120 bp, synthetic construct; identical to SEQ ID NO: 6681
  source 1..120: mol_type = other DNA

SEQ ID NO: 6686 - DNA, 120 bp, synthetic construct; identical to SEQ ID NO: 6682
  source 1..120: mol_type = other DNA

SEQ ID NO: 6687 - DNA, 120 bp, synthetic construct; identical to SEQ ID NO: 6683
  source 1..120: mol_type = other DNA

SEQ ID NO: 6688 - DNA, 120 bp, synthetic construct; identical to SEQ ID NO: 6684
  source 1..120: mol_type = other DNA

SEQ ID NO: 6689 - DNA, 120 bp, synthetic construct
  source 1..120: mol_type = other DNA
tactaattacacataaaactttcaaaatacaaaaaataaacacttctttaataaacaataacacatatcatcaactccacaattttactttaaaatccacaaaataaaccaccaccaaaa

SEQ ID NO: 6690 - DNA, 120 bp, synthetic construct
  source 1..120: mol_type = other DNA
tattaattatatgtaggatttttaaggtgtagaaaatgggtatttttttggtaagtagtgatatatgttattaattttataattttattttaggatttataaagtggattgttattaaag

SEQ ID NO: 6691 - DNA, 120 bp, synthetic construct
  source 1..120: mol_type = other DNA
aattactaattacacataaaactttcaaaatacaaaaaataaacacttctttaataaacaatatcatcaactccacaattttactttaaaatccacaaaataaaccaccaccaaaaaaaa

SEQ ID NO: 6692 - DNA, 120 bp, synthetic construct
  source 1..120: mol_type = other DNA
aattattaattatatgtaggatttttaaggtgtagaaaatgggtatttttttggtaagtagtgttattaattttataattttattttaggatttataaagtggattgttattaaagaggg

SEQ ID NO: 6693 - DNA, 120 bp, synthetic construct
  source 1..120: mol_type = other DNA
tactaattacacgtaaaactttcaaaatacaaaaaataaacacttctttaataaacaataacacatatcatcaactccacaattttactttaaaatccacaaaataaaccgccaccaaaa

SEQ ID NO: 6694 - DNA, 120 bp, synthetic construct
  source 1..120: mol_type = other DNA
tattaattatacgtaggatttttaaggtgtagaaaatgggtatttttttggtaagtagtgatatatgttattaattttataattttattttaggatttataaagtggatcgttattaaag

SEQ ID NO: 6695 - DNA, 120 bp, synthetic construct
  source 1..120: mol_type = other DNA
aattactaattacacgtaaaactttcaaaatacaaaaaataaacacttctttaataaacaatatcatcaactccacaattttactttaaaatccacaaaataaaccgccaccaaaaaaaa

SEQ ID NO: 6696 - DNA, 120 bp, synthetic construct
  source 1..120: mol_type = other DNA
aattattaattatacgtaggatttttaaggtgtagaaaatgggtatttttttggtaagtagtgttattaattttataattttattttaggatttataaagtggatcgttattaaagaggg

SEQ ID NO: 6697 - DNA, 120 bp, synthetic construct
  source 1..120: mol_type = other DNA
aattaaaatcaccctaaccaaactaatcttaacaaaatattatcacaaactaaaaaacactcaataaaaacattataaaaaaaaaaaactatatctataataatcctaacctaataaccc

SEQ ID NO: 6698 - DNA, 120 bp, synthetic construct
  source 1..120: mol_type = other DNA
ggttagggttgttttgattgggttggttttggtaggatattattatagattgaggagtatttagtaagaatattatgggaagaaagggttatgtttatagtaattttgatttggtggttt

SEQ ID NO: 6699 - DNA, 120 bp, synthetic construct
  source 1..120: mol_type = other DNA
aaatcaccctaaccaaactaatcttaacaaaatattatcacaaactaaaaaacactataaacccccaataaaaacattataaaaaaaaaaaactatatctataataatcctaacctaata

SEQ ID NO: 6700 - DNA, 120 bp, synthetic construct
  source 1..120: mol_type = other DNA
gggttgttttgattgggttggttttggtaggatattattatagattgaggagtattgtagatttttagtaagaatattatgggaagaaagggttatgtttatagtaattttgatttggtg

SEQ ID NO: 6701 - DNA, 120 bp, synthetic construct
  source 1..120: mol_type = other DNA
aattaaaatcgccctaaccgaactaatcttaacaaaatattatcacaaactaaaaaacactcaataaaaacattataaaaaaaaaaaactatatctataataatcctaacctaataaccc

SEQ ID NO: 6702 - DNA, 120 bp, synthetic construct
  source 1..120: mol_type = other DNA
ggttagggtcgttttgatcgggttggttttggtaggatattattatagattgaggagtatttagtaagaatattatgggaagaaagggttatgtttatagtaattttgatttggtggttt

SEQ ID NO: 6703 - DNA, 120 bp, synthetic construct
  source 1..120: mol_type = other DNA
aaatcgccctaaccgaactaatcttaacaaaatattatcacaaactaaaaaacactataaacccccaataaaaacattataaaaaaaaaaaactatatctataataatcctaacctaata

SEQ ID NO: 6704 - DNA, 120 bp, synthetic construct
  source 1..120: mol_type = other DNA
gggtcgttttgatcgggttggttttggtaggatattattatagattgaggagtattgtagatttttagtaagaatattatgggaagaaagggttatgtttatagtaattttgatttggtg

SEQ ID NO: 6705 - DNA, 120 bp, synthetic construct
  source 1..120: mol_type = other DNA
aataaaaaaaaatatcatataaatatctaaaaaaaaaaattcttaaaaaaaaaaaaccacatccttaaaatataaatcaacctaacattttcaaaaaacaataaaaaaaccaatataaat

SEQ ID NO: 6706 - DNA, 120 bp, synthetic construct
  source 1..120: mol_type = other DNA
aatgagggaaaatgttatgtggatatttgggagagagagtttttaaaagaagaaaattatatttttgagatgtgagttaatttagtatttttaagaaataataaggaggttggtatggat

SEQ ID NO: 6707 - DNA, 120 bp, synthetic construct
  source 1..120: mol_type = other DNA
aaaaaaatatcatataaatatctaaaaaaaaaaattcttaaaaaaaaaaaaccacaacacaaaaatccttaaaatataaatcaacctaacattttcaaaaaacaataaaaaaaccaatat

SEQ ID NO: 6708 - DNA, 120 bp, synthetic construct
  source 1..120: mol_type = other DNA
gggaaaatgttatgtggatatttgggagagagagtttttaaaagaagaaaattatagtgtaaaggtttttgagatgtgagttaatttagtatttttaagaaataataaggaggttggtat

SEQ ID NO: 6709 - DNA, 120 bp, synthetic construct
  source 1..120: mol_type = other DNA
aataaaaaaaaatatcatataaatatctaaaaaaaaaaattcttaaaaaaaaaaaaccacatccttaaaatataaatcaacctaacattttcaaaaaacaataaaaaaaccgatataaat

SEQ ID NO: 6710 - DNA, 120 bp, synthetic construct
  source 1..120: mol_type = other DNA
aatgagggaaaatgttatgtggatatttgggagagagagtttttaaaagaagaaaattatatttttgagatgtgagttaatttagtatttttaagaaataataaggaggtcggtatggat

SEQ ID NO: 6711 - DNA, 120 bp, synthetic construct
  source 1..120: mol_type = other DNA
aaaaaaatatcatataaatatctaaaaaaaaaaattcttaaaaaaaaaaaaccacaacgcaaaaatccttaaaatataaatcaacctaacattttcaaaaaacaataaaaaaaccgatat

SEQ ID NO: 6712 - DNA, 120 bp, synthetic construct
  source 1..120: mol_type = other DNA
gggaaaatgttatgtggatatttgggagagagagtttttaaaagaagaaaattatagcgtaaaggtttttgagatgtgagttaatttagtatttttaagaaataataaggaggtcggtat

SEQ ID NO: 6713 - DNA, 120 bp, synthetic construct
  source 1..120: mol_type = other DNA
aactaattttaccaaacctatcaaaaaaaaccaaaactactacatatcataaaaaaaaactaaatacattatctaaactcctaaaaacccacttaaccctttcatcccttccatatatta

SEQ ID NO: 6714 - DNA, 120 bp, synthetic construct
  source 1..120: mol_type = other DNA
ggttagttttattaaatttattaagaaaggttaaggttattatgtattatgagaagggattgaatgtattgtttgggtttttagaggtttatttaatttttttattttttttgtatatta

SEQ ID NO: 6715 - DNA, 120 bp, synthetic construct
  source 1..120: mol_type = other DNA
attttaccaaacctatcaaaaaaaaccaaaactactacatatcataaaaaaaaactaattacacaaaatacattatctaaactcctaaaaacccacttaaccctttcatcccttccatat

SEQ ID NO: 6716 - DNA, 120 bp, synthetic construct
  source 1..120: mol_type = other DNA
gttttattaaatttattaagaaaggttaaggttattatgtattatgagaagggattgattatatagaatgtattgtttgggtttttagaggtttatttaatttttttattttttttgtat

SEQ ID NO: 6717 - DNA, 120 bp, synthetic construct
  source 1..120: mol_type = other DNA
aactaattttaccaaacctatcaaaaaaaaccaaaactactacgtatcataaaaaaaaactaaatacattatctaaactcctaaaaacccacttaaccctttcatcccttccgtatatta

SEQ ID NO: 6718 - DNA, 120 bp, synthetic construct
  source 1..120: mol_type = other DNA
ggttagttttattaaatttattaagaaaggttaaggttattacgtattatgagaagggattgaatgtattgtttgggtttttagaggtttatttaatttttttatttttttcgtatatta

SEQ ID NO: 6719 - DNA, 120 bp, synthetic construct
  source 1..120: mol_type = other DNA
attttaccaaacctatcaaaaaaaaccaaaactactacgtatcataaaaaaaaactaattacacaaaatacattatctaaactcctaaaaacccacttaaccctttcatcccttccgtat

SEQ ID NO: 6720 - DNA, 120 bp, synthetic construct
  source 1..120: mol_type = other DNA
gttttattaaatttattaagaaaggttaaggttattacgtattatgagaagggattgattatatagaatgtattgtttgggtttttagaggtttatttaatttttttatttttttcgtat

SEQ ID NO: 6721 - DNA, 120 bp, synthetic construct
  source 1..120: mol_type = other DNA
aatactttttatttatttatttattttacttcattatactcttaaataaaaaaattaaaaattctcttactctcaatcattaataaaaaacattcaatctttcaccattaaatataatat

SEQ ID NO: 6722 - DNA, 120 bp, synthetic construct
  source 1..120: mol_type = other DNA
aatgttttttatttatttatttgttttgttttgttgtatttttgaatagaaaagttaaaagtttttttgtttttagttattaatggaaagtatttaattttttattattaaatgtgatgt

SEQ ID NO: 6723 - DNA, 120 bp, synthetic construct
  source 1..120: mol_type = other DNA
tttttatttatttatttattttacttcattatactcttaaataaaaaaattaaaaataaatattcttctcttactctcaatcattaataaaaaacattcaatctttcaccattaaatata

SEQ ID NO: 6724 - DNA, 120 bp, synthetic construct
  source 1..120: mol_type = other DNA
tttttatttatttatttgttttgttttgttgtatttttgaatagaaaagttaaaagtggatgttttttttttgtttttagttattaatggaaagtatttaattttttattattaaatgtg

SEQ ID NO: 6725 - DNA, 120 bp, synthetic construct
  source 1..120: mol_type = other DNA
aatactttttatttatttatttattttacttcgttatactcttaaataaaaaaattaaaaattctcttactctcaatcattaataaaaaacattcaatctttcaccattaaatataatat

SEQ ID NO: 6726 - DNA, 120 bp, synthetic construct
  source 1..120: mol_type = other DNA
aatgttttttatttatttatttgttttgtttcgttgtatttttgaatagaaaagttaaaagtttttttgtttttagttattaatggaaagtatttaattttttattattaaatgtgatgt

SEQ ID NO: 6727 - DNA, 120 bp, synthetic construct
  source 1..120: mol_type = other DNA
tttttatttatttatttattttacttcgttatactcttaaataaaaaaattaaaaataaatattcttctcttactctcaatcattaataaaaaacattcaatctttcaccattaaatata

SEQ ID NO: 6728 - DNA, 120 bp, synthetic construct
  source 1..120: mol_type = other DNA
tttttatttatttatttgttttgtttcgttgtatttttgaatagaaaagttaaaagtggatgttttttttttgtttttagttattaatggaaagtatttaattttttattattaaatgtg

SEQ ID NO: 6729 - DNA, 120 bp, synthetic construct
  source 1..120: mol_type = other DNA
aataaaaaatttaatattaaaactttattaataatctttctttacctttcacttaatcaaataaattacaatatctttcttaacttttatattctataattatattataacatatattta

SEQ ID NO: 6730 - DNA, 120 bp, synthetic construct
  source 1..120: mol_type = other DNA
ggtgagaagtttagtgttaggattttgttggtaatttttttttattttttatttgattaagtggattataatattttttttggtttttatgttttatggttgtattatgatatgtattta

SEQ ID NO: 6731 - DNA, 120 bp, synthetic construct
  source 1..120: mol_type = other DNA
aaaatttaatattaaaactttattaataatctttctttacctttcacttaatcaaaattttttcaataaattacaatatctttcttaacttttatattctataattatattataacatat

SEQ ID NO: 6732 - DNA, 120 bp, synthetic construct
  source 1..120: mol_type = other DNA
gaagtttagtgttaggattttgttggtaatttttttttattttttatttgattaagatttttttaatggattataatattttttttggtttttatgttttatggttgtattatgatatgt

SEQ ID NO: 6733 - DNA, 120 bp, synthetic construct; identical to SEQ ID NO: 6729
  source 1..120: mol_type = other DNA

SEQ ID NO: 6734 - DNA, 120 bp, synthetic construct; identical to SEQ ID NO: 6730
  source 1..120: mol_type = other DNA

SEQ ID NO: 6735 - DNA, 120 bp, synthetic construct; identical to SEQ ID NO: 6731
  source 1..120: mol_type = other DNA

SEQ ID NO: 6736 - DNA, 120 bp, synthetic construct; identical to SEQ ID NO: 6732
  source 1..120: mol_type = other DNA

SEQ ID NO: 6737 - DNA, 120 bp, synthetic construct
  source 1..120: mol_type = other DNA
aaaaaactcactaaaacactctataataacaccctaaataacaaacaaataacaaaccactaaccaaaacctacccatcaatcctatcatacaaacaaacacccttcaaaaaactactaa

SEQ ID NO: 6738 - DNA, 120 bp, synthetic construct
  source 1..120: mol_type = other DNA
agggagtttattggggtattttgtggtggtgttttgggtggtaagtaagtgataggttattagttaggatttgtttattagttttattatgtaaataaatattttttaagaggttattga

SEQ ID NO: 6739 - DNA, 120 bp, synthetic construct
  source 1..120: mol_type = other DNA
aactcactaaaacactctataataacaccctaaataacaaacaaataacaaaccactataaaaaaaccaaaacctacccatcaatcctatcatacaaacaaacacccttcaaaaaactac

SEQ ID NO: 6740 - DNA, 120 bp, synthetic construct
  source 1..120: mol_type = other DNA
agtttattggggtattttgtggtggtgttttgggtggtaagtaagtgataggttattgtagagaagttaggatttgtttattagttttattatgtaaataaatattttttaagaggttat

SEQ ID NO: 6741 - DNA, 120 bp, synthetic construct
  source 1..120: mol_type = other DNA
aaaaaactcactaaaacactctataataacgccctaaataacaaacaaataacaaaccactaaccaaaacctacccatcaatcctatcatacaaacaaacacccttcaaaaaactactaa

SEQ ID NO: 6742 - DNA, 120 bp, synthetic construct
  source 1..120: mol_type = other DNA
agggagtttattggggtattttgtggtggcgttttgggtggtaagtaagtgataggttattagttaggatttgtttattagttttattatgtaaataaatattttttaagaggttattga

SEQ ID NO: 6743 - DNA, 120 bp, synthetic construct
  source 1..120: mol_type = other DNA
aactcactaaaacactctataataacgccctaaataacaaacaaataacaaaccactataaaaaaaccaaaacctacccatcaatcctatcatacaaacaaacacccttcaaaaaactac

SEQ ID NO: 6744 - DNA, 120 bp, synthetic construct
  source 1..120: mol_type = other DNA
agtttattggggtattttgtggtggcgttttgggtggtaagtaagtgataggttattgtagagaagttaggatttgtttattagttttattatgtaaataaatattttttaagaggttat

SEQ ID NO: 6745 - DNA, 120 bp, synthetic construct
  source 1..120: mol_type = other DNA
ataacactatacctacctattttaattaaaatcactatattatacaaaaattaattaatcataaaataaaattactatcaaaaaaaaaattcttattttcctattacataattcttacca

SEQ ID NO: 6746 - DNA, 120 bp, synthetic construct
  source 1..120: mol_type = other DNA
atgatattatgtttgtttattttaattaaaattattatgttatataaaagttgattaattataaagtaaaattgttattaagggaaaaatttttatttttttattatatgatttttgtta

SEQ ID NO: 6747 - DNA, 120 bp, synthetic construct
  source 1..120: mol_type = other DNA
atacataacactatacctacctattttaattaaaatcactatattatacaaaaattaattataaaattactatcaaaaaaaaaattcttattttcctattacataattcttaccattata

SEQ ID NO: 6748 - DNA, 120 bp, synthetic construct
  source 1..120: mol_type = other DNA
atatatgatattatgtttgtttattttaattaaaattattatgttatataaaagttgattataaaattgttattaagggaaaaatttttatttttttattatatgatttttgttattata

SEQ ID NO: 6749 - DNA, 120 bp, synthetic construct; identical to SEQ ID NO: 6745
  source 1..120: mol_type = other DNA

SEQ ID NO: 6750 - DNA, 120 bp, synthetic construct; identical to SEQ ID NO: 6746
  source 1..120: mol_type = other DNA

SEQ ID NO: 6751 - DNA, 120 bp, synthetic construct; identical to SEQ ID NO: 6747
  source 1..120: mol_type = other DNA

SEQ ID NO: 6752 - DNA, 120 bp, synthetic construct; identical to SEQ ID NO: 6748
  source 1..120: mol_type = other DNA

SEQ ID NO: 6753 - DNA, 120 bp, synthetic construct
  source 1..120: mol_type = other DNA
acaaactaactacatcaaaatcttaaaaaaaaaaaacaaacataatctataaccccaaataacccaaaaccaactttaacaaacctaccacaaacaaacatctcaatcatctaactaaac

SEQ ID NO: 6754 - DNA, 120 bp, synthetic construct
  source 1..120: mol_type = other DNA
gtaaattgattgtattagaattttggagagggggaatgggtatggtttgtagttttaggtgatttaaggttagttttggtaaatttgttatagataaatattttaattgtttggttgaat

SEQ ID NO: 6755 - DNA, 120 bp, synthetic construct
  source 1..120: mol_type = other DNA
actaactacatcaaaatcttaaaaaaaaaaaacaaacataatctataaccccaaataatcttacacccaaaaccaactttaacaaacctaccacaaacaaacatctcaatcatctaacta

SEQ ID NO: 6756 - DNA, 120 bp, synthetic construct
  source 1..120: mol_type = other DNA
attgattgtattagaattttggagagggggaatgggtatggtttgtagttttaggtgattttatatttaaggttagttttggtaaatttgttatagataaatattttaattgtttggttg

SEQ ID NO: 6757 - DNA, 120 bp, synthetic construct
  source 1..120: mol_type = other DNA
acaaactaactacatcaaaatcttaaaaaaaaaaaacgaacataatctataaccccaaataacccaaaaccaactttaacaaacctaccacaaacaaacatctcaatcgtctaactaaac

SEQ ID NO: 6758 - DNA, 120 bp, synthetic construct
  source 1..120: mol_type = other DNA
gtaaattgattgtattagaattttggagagggggaacgggtatggtttgtagttttaggtgatttaaggttagttttggtaaatttgttatagataaatattttaatcgtttggttgaat

SEQ ID NO: 6759 - DNA, 120 bp, synthetic construct
  source 1..120: mol_type = other DNA
actaactacatcaaaatcttaaaaaaaaaaaacgaacataatctataaccccaaataatcttacacccaaaaccaactttaacaaacctaccacaaacaaacatctcaatcgtctaacta

SEQ ID NO: 6760 - DNA, 120 bp, synthetic construct
  source 1..120: mol_type = other DNA
attgattgtattagaattttggagagggggaacgggtatggtttgtagttttaggtgattttatatttaaggttagttttggtaaatttgttatagataaatattttaatcgtttggttg

SEQ ID NO: 6761 - DNA, 120 bp, synthetic construct
  source 1..120: mol_type = other DNA
tattcattaactaaacaattttacaaaataaaactacaaaaattaaaaacccctaaaaataaaaaaataaaacaaatatataaaaaaaaaccataaaaactaaattctcaaataattcac

SEQ ID NO: 6762 - DNA, 120 bp, synthetic construct
  source 1..120: mol_type = other DNA
tgtttattgattggataattttgtagggtgagattgtgaaaattaagggtttttaaaaataaagagatggaataaatatgtaagaaagagttatgaaaattgaatttttaagtaatttat

SEQ ID NO: 6763 - DNA, 120 bp, synthetic construct
  source 1..120: mol_type = other DNA
cattaactaaacaattttacaaaataaaactacaaaaattaaaaacccctaaaaataataaacttaaaaaataaaacaaatatataaaaaaaaaccataaaaactaaattctcaaataat

SEQ ID NO: 6764 - DNA, 120 bp, synthetic construct
  source 1..120: mol_type = other DNA
tattgattggataattttgtagggtgagattgtgaaaattaagggtttttaaaaataataaatttaagagatggaataaatatgtaagaaagagttatgaaaattgaatttttaagtaat

SEQ ID NO: 6765 - DNA, 120 bp, synthetic construct
  source 1..120: mol_type = other DNA
tattcattaactaaacaattttacaaaataaaactacgaaaattaaaaacccctaaaaataaaaaaataaaacaaatatataaaaaaaaaccataaaaactaaattctcaaataattcac

SEQ ID NO: 6766 - DNA, 120 bp, synthetic construct
  source 1..120: mol_type = other DNA
tgtttattgattggataattttgtagggtgagattgcgaaaattaagggtttttaaaaataaagagatggaataaatatgtaagaaagagttatgaaaattgaatttttaagtaatttac

SEQ ID NO: 6767 - DNA, 120 bp, synthetic construct
  source 1..120: mol_type = other DNA
cattaactaaacaattttacaaaataaaactacgaaaattaaaaacccctaaaaataataaacttaaaaaataaaacaaatatataaaaaaaaaccataaaaactaaattctcaaataat

SEQ ID NO: 6768 - DNA, 120 bp, synthetic construct
  source 1..120: mol_type = other DNA
tattgattggataattttgtagggtgagattgcgaaaattaagggtttttaaaaataataaatttaagagatggaataaatatgtaagaaagagttatgaaaattgaatttttaagtaat

SEQ ID NO: 6769 - DNA, 120 bp, synthetic construct
  source 1..120: mol_type = other DNA
aactctatacaaataaaaatcaaatctaaatcacctctaaatccaaaaatcccaacccataaaataactaataactaaaaataaatataaatatcccaacccaaacaaaacacaaaactc

SEQ ID NO: 6770 - DNA, 120 bp, synthetic construct
  source 1..120: mol_type = other DNA
agttttgtataggtggagattaggtttgagttatttttgagtttagaggttttaatttatagggtgattggtggttggaggtgaatatagatgttttagtttaggtagagtataggattt

SEQ ID NO: 6771 - DNA, 120 bp, synthetic construct
  source 1..120: mol_type = other DNA
tatacaaataaaaatcaaatctaaatcacctctaaatccaaaaatcccaacccataaaacttcacaaaataactaataactaaaaataaatataaatatcccaacccaaacaaaacacaa

SEQ ID NO: 6772 - DNA, 120 bp, synthetic construct
  source 1..120: mol_type = other DNA
tgtataggtggagattaggtttgagttatttttgagtttagaggttttaatttataggattttatggggtgattggtggttggaggtgaatatagatgttttagtttaggtagagtatag

SEQ ID NO: 6773 - DNA, 120 bp, synthetic construct; identical to SEQ ID NO: 6769
  source 1..120: mol_type = other DNA

SEQ ID NO: 6774 - DNA, 120 bp, synthetic construct; identical to SEQ ID NO: 6770
  source 1..120: mol_type = other DNA

SEQ ID NO: 6775 - DNA, 120 bp, synthetic construct
  source 1..120: mol_type = other DNA
tatacaaataaaaatcaaatctaaatcacctctaaatccaaaaatcccaacccataaaacttcacgaaataactaataactaaaaataaatataaatatcccaacccaaacaaaacacaa

SEQ ID NO: 6776 - DNA, 120 bp, synthetic construct
  source 1..120: mol_type = other DNA
tgtataggtggagattaggtttgagttatttttgagtttagaggttttaatttataggattttacggggtgattggtggttggaggtgaatatagatgttttagtttaggtagagtatag

SEQ ID NO: 6777 - DNA, 120 bp, synthetic construct
  source 1..120: mol_type = other DNA
aaacttaaaataaaaaaaaatttaaccaattcaacacatattttaaccaatctccttcaactatatatatcaatacctccataacatatactaatctcaatctcttcacttactcaaaaa

SEQ ID NO: 6778 - DNA, 120 bp, synthetic construct
  source 1..120: mol_type = other DNA
aaatttgaagtgaaaagaagtttgattaatttggtatatgttttaattaattttttttaattatatgtgttagtatttttatagtatatattggttttagtttttttatttgtttgaaga

SEQ ID NO: 6779 - DNA, 120 bp, synthetic construct
  source 1..120: mol_type = other DNA
tattaaacttaaaataaaaaaaaatttaaccaattcaacacatattttaaccaatctcctttatatcaatacctccataacatatactaatctcaatctcttcacttactcaaaaataaa

SEQ ID NO: 6780 - DNA, 120 bp, synthetic construct
  source 1..120: mol_type = other DNA
tgttaaatttgaagtgaaaagaagtttgattaatttggtatatgttttaattaattttttttgtgttagtatttttatagtatatattggttttagtttttttatttgtttgaagatgaa

SEQ ID NO: 6781 - DNA, 120 bp, synthetic construct
  source 1..120: mol_type = other DNA
aaacttaaaataaaaaaaaatttaaccaattcgacacatattttaaccaatctccttcaactatatatatcaatacctccataacatatactaatctcaatctcttcacttactcgaaaa

SEQ ID NO: 6782 - DNA, 120 bp, synthetic construct
  source 1..120: mol_type = other DNA
aaatttgaagtgaaaagaagtttgattaattcggtatatgttttaattaattttttttaattatatgtgttagtatttttatagtatatattggttttagtttttttatttgttcgaaga

SEQ ID NO: 6783 - DNA, 120 bp, synthetic construct
  source 1..120: mol_type = other DNA
tattaaacttaaaataaaaaaaaatttaaccaattcgacacatattttaaccaatctcctttatatcaatacctccataacatatactaatctcaatctcttcacttactcgaaaataaa

SEQ ID NO: 6784 - DNA, 120 bp, synthetic construct
  source 1..120: mol_type = other DNA
tgttaaatttgaagtgaaaagaagtttgattaattcggtatatgttttaattaattttttttgtgttagtatttttatagtatatattggttttagtttttttatttgttcgaagatgaa

SEQ ID NO: 6785 - DNA, 120 bp, synthetic construct
  source 1..120: mol_type = other DNA
aaaatcaaaataaaatcacttctattttttaaaaaccaccaccaccaaaaacaaaaacaaatcctaacaaataaaaccaaataaaaaatataaaaaaaaaaccctcatatatatatacct

SEQ ID NO: 6786 - DNA, 120 bp, synthetic construct
  source 1..120: mol_type = other DNA
agaattaaaatggagttatttttgttttttaaaaattattgttattaaaaataaaaataaattttgataaatagagttaggtaaagggtatgaaaagagggtttttatgtgtgtgtgttt

SEQ ID NO: 6787 - DNA, 120 bp, synthetic construct
  source 1..120: mol_type = other DNA
ttatcaaaatcaaaataaaatcacttctattttttaaaaaccaccaccaccaaaaacaaaaacaaataaaaccaaataaaaaatataaaaaaaaaaccctcatatatatatacctaataa

SEQ ID NO: 6788 - DNA, 120 bp, synthetic construct
  source 1..120: mol_type = other DNA
ttgttagaattaaaatggagttatttttgttttttaaaaattattgttattaaaaataaaaataaatagagttaggtaaagggtatgaaaagagggtttttatgtgtgtgtgtttgataa

SEQ ID NO: 6789 - DNA, 120 bp, synthetic construct
  source 1..120: mol_type = other DNA
aaaatcaaaataaaatcacttctattttttaaaaaccaccgccaccaaaaacaaaaacaaatcctaacaaataaaaccaaataaaaaatataaaaaaaaaaccctcatatatatatacct

SEQ ID NO: 6790 - DNA, 120 bp, synthetic construct
  source 1..120: mol_type = other DNA
agaattaaaatggagttatttttgttttttaaaaattatcgttattaaaaataaaaataaattttgataaatagagttaggtaaagggtatgaaaagagggtttttatgtgtgtgtgttt

SEQ ID NO: 6791 - DNA, 120 bp, synthetic construct
  source 1..120: mol_type = other DNA
ttatcaaaatcaaaataaaatcacttctattttttaaaaaccaccgccaccaaaaacaaaaacaaataaaaccaaataaaaaatataaaaaaaaaaccctcatatatatatacctaataa

SEQ ID NO: 6792 - DNA, 120 bp, synthetic construct
  source 1..120: mol_type = other DNA
ttgttagaattaaaatggagttatttttgttttttaaaaattatcgttattaaaaataaaaataaatagagttaggtaaagggtatgaaaagagggtttttatgtgtgtgtgtttgataa

SEQ ID NO: 6793 - DNA, 120 bp, synthetic construct
  source 1..120: mol_type = other DNA
aatatatatttatatatatatatccatatatataaatacataaactctcttacaaaatattcctaataaaaacctaaatatactattacttataaaaataaaaactaaacaaattaaaaa

SEQ ID NO: 6794 - DNA, 120 bp, synthetic construct
  source 1..120: mol_type = other DNA
aatgtgtgtttgtatgtgtgtgtttatgtgtataaatgtataagtttttttatagaatatttttagtaaaaatttaaatatattgttgtttgtgaggataggaattgaatagattggaga

SEQ ID NO: 6795 - DNA, 120 bp, synthetic construct
  source 1..120: mol_type = other DNA
aaaaaaatatatatttatatatatatatccatatatataaatacataaactctcttacaaataaaaacctaaatatactattacttataaaaataaaaactaaacaaattaaaaatcaaa

SEQ ID NO: 6796 - DNA, 120 bp, synthetic construct
  source 1..120: mol_type = other DNA
aggaaaatgtgtgtttgtatgtgtgtgtttatgtgtataaatgtataagtttttttatagataaaaatttaaatatattgttgtttgtgaggataggaattgaatagattggagattgaa

SEQ ID NO: 6797 - DNA, 120 bp, synthetic construct; identical to SEQ ID NO: 6793
  source 1..120: mol_type = other DNA

SEQ ID NO: 6798 - DNA, 120 bp, synthetic construct; identical to SEQ ID NO: 6794
  source 1..120: mol_type = other DNA

SEQ ID NO: 6799 - DNA, 120 bp, synthetic construct
  source 1..120: mol_type = other DNA
aaaaaaatatatatttatatatatatatccatatatataaatacataaactctcttacaaataaaaacctaaatatactattacttataaaaataaaaactaaacaaattaaaaatcgaa

SEQ ID NO: 6800 - DNA, 120 bp, synthetic construct
  source 1..120: mol_type = other DNA
aggaaaatgtgtgtttgtatgtgtgtgtttatgtgtataaatgtataagtttttttatagataaaaatttaaatatattgttgtttgtgaggataggaattgaatagattggagatcgaa

SEQ ID NO: 6801 - DNA, 120 bp, synthetic construct
  source 1..120: mol_type = other DNA
caacataaaaaaaactattacaaaatataaaaaatcataaaactatttataccctttaatactatcccttaatattaacttcaaaacaataatctaaaaaataacaaaaaactctctaca

SEQ ID NO: 6802 - DNA, 120 bp, synthetic construct
  source 1..120: mol_type = other DNA
tagtatgagggaagttattgtaaaatatagaaagttatgagattatttatgttttttgatattattttttagtattgattttaagatagtgatttaaaggataatgaaaagttttttgta

SEQ ID NO: 6803 - DNA, 120 bp, synthetic construct
  source 1..120: mol_type = other DNA
ataaaaaaaactattacaaaatataaaaaatcataaaactatttataccctttaatacaatcatcctatcccttaatattaacttcaaaacaataatctaaaaaataacaaaaaactctc

SEQ ID NO: 6804 - DNA, 120 bp, synthetic construct
  source 1..120: mol_type = other DNA
atgagggaagttattgtaaaatatagaaagttatgagattatttatgttttttgatataattattttattttttagtattgattttaagatagtgatttaaaggataatgaaaagttttt

SEQ ID NO: 6805 - DNA, 120 bp, synthetic construct
  source 1..120: mol_type = other DNA
caacataaaaaaaactattacaaaatataaaaaatcataaaactatttataccctttaatactatcccttaatattaacttcaaaacaataatctaaaaaataacgaaaaactctctaca

SEQ ID NO: 6806 - DNA, 120 bp, synthetic construct
  source 1..120: mol_type = other DNA
tagtatgagggaagttattgtaaaatatagaaagttatgagattatttatgttttttgatattattttttagtattgattttaagatagtgatttaaaggataacgaaaagttttttgta

SEQ ID NO: 6807 - DNA, 120 bp, synthetic construct
  source 1..120: mol_type = other DNA
ataaaaaaaactattacaaaatataaaaaatcataaaactatttataccctttaatacaatcatcctatcccttaatattaacttcaaaacaataatctaaaaaataacgaaaaactctc

SEQ ID NO: 6808 - DNA, 120 bp, synthetic construct
  source 1..120: mol_type = other DNA
atgagggaagttattgtaaaatatagaaagttatgagattatttatgttttttgatataattattttattttttagtattgattttaagatagtgatttaaaggataacgaaaagttttt

SEQ ID NO: 6809 - DNA, 120 bp, synthetic construct
  source 1..120: mol_type = other DNA
ccaaaaccctactaaaaacaaccaaaaaaacaaaaatataaacaacactaaaaatacaaccatcataactaaaaaatccaaataaacccataactaaaaatctcctacttctactaaaaa

SEQ ID NO: 6810 - DNA, 120 bp, synthetic construct
  source 1..120: mol_type = other DNA
ttagagttttgttggaggtggttagggaggtaggggtgtgggtgatattgggaatgtagttattgtagttgaggagtttaagtgggtttatgattggaagttttttgtttttattaagaa

SEQ ID NO: 6811 - DNA, 120 bp, synthetic construct
  source 1..120: mol_type = other DNA
taacccaaaaccctactaaaaacaaccaaaaaaacaaaaatataaacaacactaaaaatacaactaaaaaatccaaataaacccataactaaaaatctcctacttctactaaaaattttt

SEQ ID NO: 6812 - DNA, 120 bp, synthetic construct
  source 1..120: mol_type = other DNA
tgatttagagttttgttggaggtggttagggaggtaggggtgtgggtgatattgggaatgtagttgaggagtttaagtgggtttatgattggaagttttttgtttttattaagaattttt

SEQ ID NO: 6813 - DNA, 120 bp, synthetic construct
  source 1..120: mol_type = other DNA
ccaaaaccctactaaaaacgaccaaaaaaacaaaaatataaacgacactaaaaatacaaccatcgtaactaaaaaatccaaataaacccataactaaaaatctcctacttctactaaaaa

SEQ ID NO: 6814 - DNA, 120 bp, synthetic construct
  source 1..120: mol_type = other DNA
ttagagttttgttggaggcggttagggaggtaggggtgtgggcgatattgggaatgtagttatcgtagttgaggagtttaagtgggtttatgattggaagttttttgtttttattaagaa

SEQ ID NO: 6815 - DNA, 120 bp, synthetic construct
  source 1..120: mol_type = other DNA
taacccaaaaccctactaaaaacgaccaaaaaaacaaaaatataaacgacactaaaaatacaactaaaaaatccaaataaacccataactaaaaatctcctacttctactaaaaattttt

SEQ ID NO: 6816 - DNA, 120 bp, synthetic construct
  source 1..120: mol_type = other DNA
tgatttagagttttgttggaggcggttagggaggtaggggtgtgggcgatattgggaatgtagttgaggagtttaagtgggtttatgattggaagttttttgtttttattaagaattttt

SEQ ID NO: 6817 - DNA, 120 bp, synthetic construct
  source 1..120: mol_type = other DNA
cttaattaaacccctttattaactaataaaaaaaaaaaaatttctaaaaattttcactcaataccccaaaaactactacacattttatctaaacttaaccacctcctctaccaaaattat

SEQ ID NO: 6818 - DNA, 120 bp, synthetic construct
  source 1..120: mol_type = other DNA
tttggttgaatttttttattggttgataggagagagaagatttttagagatttttatttaatgttttagaagttattgtatattttgtttgagtttggttattttttttgttagagttgt

SEQ ID NO: 6819 - DNA, 120 bp, synthetic construct
  source 1..120: mol_type = other DNA
ttaaacccctttattaactaataaaaaaaaaaaaatttctaaaaattttcactcaatactaacattaccccaaaaactactacacattttatctaaacttaaccacctcctctaccaaaa

SEQ ID NO: 6820 - DNA, 120 bp, synthetic construct
  source 1..120: mol_type = other DNA
ttgaatttttttattggttgataggagagagaagatttttagagatttttatttaatgttagtattgttttagaagttattgtatattttgtttgagtttggttattttttttgttagag

SEQ ID NO: 6821 - DNA, 120 bp, synthetic construct; identical to SEQ ID NO: 6817
  source 1..120: mol_type = other DNA

SEQ ID NO: 6822 - DNA, 120 bp, synthetic construct; identical to SEQ ID NO: 6818
  source 1..120: mol_type = other DNA

SEQ ID NO: 6823 - DNA, 120 bp, synthetic construct; identical to SEQ ID NO: 6819
  source 1..120: mol_type = other DNA

SEQ ID NO: 6824 - DNA, 120 bp, synthetic construct; identical to SEQ ID NO: 6820
  source 1..120: mol_type = other DNA

SEQ ID NO: 6825 - DNA, 120 bp, synthetic construct
  source 1..120: mol_type = other DNA
taattatcaaaatataaatcctaattcaataaaaaataataacctttccaatttaaatattctccattcatttccaaatctatttctctccatttatataatcatctatatcctcctaat

SEQ ID NO: 6826 - DNA, 120 bp, synthetic construct
  source 1..120: mol_type = other DNA
tgattattaggatataagttttgatttaatgaaagatgatagtttttttaatttgaatattttttatttatttttaagtttatttttttttatttatgtaattatttatatttttttaat

SEQ ID NO: 6827 - DNA, 120 bp, synthetic construct
  source 1..120: mol_type = other DNA
atataattatcaaaatataaatcctaattcaataaaaaataataacctttccaatttaaatattcatttccaaatctatttctctccatttatataatcatctatatcctcctaatataa

SEQ ID NO: 6828 - DNA, 120 bp, synthetic construct
  source 1..120: mol_type = other DNA
gtgtgattattaggatataagttttgatttaatgaaagatgatagtttttttaatttgaatatttatttttaagtttatttttttttatttatgtaattatttatatttttttaatgtaa

SEQ ID NO: 6829 - DNA, 120 bp, synthetic construct; identical to SEQ ID NO: 6825
  source 1..120: mol_type = other DNA

SEQ ID NO: 6830 - DNA, 120 bp, synthetic construct; identical to SEQ ID NO: 6826
  source 1..120: mol_type = other DNA

SEQ ID NO: 6831 - DNA, 120 bp, synthetic construct; identical to SEQ ID NO: 6827
  source 1..120: mol_type = other DNA

SEQ ID NO: 6832 - DNA, 120 bp, synthetic construct; identical to SEQ ID NO: 6828
  source 1..120: mol_type = other DNA

SEQ ID NO: 6833 - DNA, 120 bp, synthetic construct
  source 1..120: mol_type = other DNA
ttaaacaataacaaacacttctttataccacctataacacccaaccccaatcataaacaaataataatactaaaatctaacaaaataaaacaacccaaacttataaatcaaaccatccta

SEQ ID NO: 6834 - DNA, 120 bp, synthetic construct
  source 1..120: mol_type = other DNA
ttaagtagtgataaatatttttttgtgttgtttgtaatatttagttttaattatagatagatggtggtgttagagtttggtagaataaaatgatttaggtttgtgagttagattattttg

SEQ ID NO: 6835 - DNA, 120 bp, synthetic construct
  source 1..120: mol_type = other DNA
acaataacaaacacttctttataccacctataacacccaaccccaatcataaacaaataacaccataataatactaaaatctaacaaaataaaacaacccaaacttataaatcaaaccat

SEQ ID NO: 6836 - DNA, 120 bp, synthetic construct
  source 1..120: mol_type = other DNA
gtagtgataaatatttttttgtgttgtttgtaatatttagttttaattatagatagatggtattgtggtggtgttagagtttggtagaataaaatgatttaggtttgtgagttagattat

SEQ ID NO: 6837 - DNA, 120 bp, synthetic construct
  source 1..120: mol_type = other DNA
ttaaacaataacaaacacttctttataccgcctataacacccaaccccaatcataaacaaataataatactaaaatctaacaaaataaaacgacccaaacttataaatcaaaccatccta

SEQ ID NO: 6838 - DNA, 120 bp, synthetic construct
  source 1..120: mol_type = other DNA
ttaagtagtgataaatatttttttgtgtcgtttgtaatatttagttttaattatagatagatggtggtgttagagtttggtagaataaaacgatttaggtttgtgagttagattattttg

SEQ ID NO: 6839 - DNA, 120 bp, synthetic construct
  source 1..120: mol_type = other DNA
acaataacaaacacttctttataccgcctataacacccaaccccaatcataaacaaataacaccgtaataatactaaaatctaacaaaataaaacgacccaaacttataaatcaaaccat

SEQ ID NO: 6840 - DNA, 120 bp, synthetic construct
  source 1..120: mol_type = other DNA
gtagtgataaatatttttttgtgtcgtttgtaatatttagttttaattatagatagatggtatcgtggtggtgttagagtttggtagaataaaacgatttaggtttgtgagttagattat

SEQ ID NO: 6841 - DNA, 120 bp, synthetic construct
  source 1..120: mol_type = other DNA
cttcttaaaacaaactatttcttctaccccttattattataatcataacatttatcattatatttatacaacatattaacaaaaatactcttaattctactaaaaaaaaacataaaaaaa

SEQ ID NO: 6842 - DNA, 120 bp, synthetic construct
  source 1..120: mol_type = other DNA
ttttttaaagtaggttattttttttattttttgttattataattataatatttattattatatttatgtaatatattaataaaagtatttttagttttattgaaaggaagtataagaaaa

SEQ ID NO: 6843 - DNA, 120 bp, synthetic construct
  source 1..120: mol_type = other DNA
taaaacaaactatttcttctaccccttattattataatcataacatttatcattatattaaacaaatttatacaacatattaacaaaaatactcttaattctactaaaaaaaaacataaa

SEQ ID NO: 6844 - DNA, 120 bp, synthetic construct
  source 1..120: mol_type = other DNA
taaagtaggttattttttttattttttgttattataattataatatttattattatattgagtagatttatgtaatatattaataaaagtatttttagttttattgaaaggaagtataag

SEQ ID NO: 6845 - DNA, 120 bp, synthetic construct; identical to SEQ ID NO: 6841
  source 1..120: mol_type = other DNA

SEQ ID NO: 6846 - DNA, 120 bp, synthetic construct; identical to SEQ ID NO: 6842
  source 1..120: mol_type = other DNA

SEQ ID NO: 6847 - DNA, 120 bp, synthetic construct; identical to SEQ ID NO: 6843
  source 1..120: mol_type = other DNA

SEQ ID NO: 6848 - DNA, 120 bp, synthetic construct; identical to SEQ ID NO: 6844
  source 1..120: mol_type = other DNA

SEQ ID NO: 6849 - DNA, 120 bp, synthetic construct
  source 1..120: mol_type = other DNA
tctaatttatattaaactctattcaaaataatttaatataataaaataattttaaataaatatatttattcattcatacacttatccaacaattatatatttaaaattcataataaataa

SEQ ID NO: 6850 - DNA, 120 bp, synthetic construct
  source 1..120: mol_type = other DNA
tttggtttatgttaaattttgtttaaaatgatttgatgtgataaaatagttttggataaatatgtttatttatttatgtatttatttaatagttatatatttagagtttatggtgaataa

SEQ ID NO: 6851 - DNA, 120 bp, synthetic construct
  source 1..120: mol_type = other DNA
taaattctaatttatattaaactctattcaaaataatttaatataataaaataattttaaatattcattcatacacttatccaacaattatatatttaaaattcataataaataaaacaa

SEQ ID NO: 6852 - DNA, 120 bp, synthetic construct
  source 1..120: mol_type = other DNA
taaattttggtttatgttaaattttgtttaaaatgatttgatgtgataaaatagttttggatatttatttatgtatttatttaatagttatatatttagagtttatggtgaataaaataa

SEQ ID NO: 6853 - DNA, 120 bp, synthetic construct; identical to SEQ ID NO: 6849
  source 1..120: mol_type = other DNA

SEQ ID NO: 6854 - DNA, 120 bp, synthetic construct; identical to SEQ ID NO: 6850
  source 1..120: mol_type = other DNA

SEQ ID NO: 6855 - DNA, 120 bp, synthetic construct; identical to SEQ ID NO: 6851
  source 1..120: mol_type = other DNA

SEQ ID NO: 6856 - DNA, 120 bp, synthetic construct; identical to SEQ ID NO: 6852
  source 1..120: mol_type = other DNA

SEQ ID NO: 6857 - DNA, 120 bp, synthetic construct
  source 1..120: mol_type = other DNA
tcccttcaaaaatattcaaatattccccctccatacaaccttacctaactactccaacccaactcatcaacctctcccctaacctccaactacccttaaaattctaaatttaaactatat

SEQ ID NO: 6858 - DNA, 120 bp, synthetic construct
  source 1..120: mol_type = other DNA
tttttttaaaggtgtttaagtattttttttttatgtagttttatttgattattttagtttagtttattagttttttttttgatttttaattgtttttggagttttgagtttaggttgtgt

SEQ ID NO: 6859 - DNA, 120 bp, synthetic construct
  source 1..120: mol_type = other DNA
ttcaaaaatattcaaatattccccctccatacaaccttacctaactactccaacccaactaaaaactcatcaacctctcccctaacctccaactacccttaaaattctaaatttaaacta

SEQ ID NO: 6860 - DNA, 120 bp, synthetic construct
  source 1..120: mol_type = other DNA
tttaaaggtgtttaagtattttttttttatgtagttttatttgattattttagtttagttggaggtttattagttttttttttgatttttaattgtttttggagttttgagtttaggttg

SEQ ID NO: 6861 - DNA, 120 bp, synthetic construct; identical to SEQ ID NO: 6857
  source 1..120: mol_type = other DNA

SEQ ID NO: 6862 - DNA, 120 bp, synthetic construct; identical to SEQ ID NO: 6858
  source 1..120: mol_type = other DNA

SEQ ID NO: 6863 - DNA, 120 bp, synthetic construct; identical to SEQ ID NO: 6859
  source 1..120: mol_type = other DNA

SEQ ID NO: 6864 - DNA, 120 bp, synthetic construct; identical to SEQ ID NO: 6860
  source 1..120: mol_type = other DNA

SEQ ID NO: 6865 - DNA, 120 bp, synthetic construct
  source 1..120: mol_type = other DNA
cacttaataaacccaaaattaaaacaatctctaactttaacattatcaacatatataaaataaacaaaaaccatcatacaactataaaaacaataattattataacacttaaaataccct

SEQ ID NO: 6866 - DNA, 120 bp, synthetic construct
  source 1..120: mol_type = other DNA
tatttaataaatttagagttgaaatagtttttaattttgatattattaatgtgtgtgaaataaataaaagttattgtgtaattatgagggtagtaattattgtaatatttgaaatgtttt

SEQ ID NO: 6867 - DNA, 120 bp, synthetic construct
  source 1..120: mol_type = other DNA
taataaacccaaaattaaaacaatctctaactttaacattatcaacatatataaaatataataaaaaacaaaaaccatcatacaactataaaaacaataattattataacacttaaaata

SEQ ID NO: 6868 - DNA, 120 bp, synthetic construct
  source 1..120: mol_type = other DNA
taataaatttagagttgaaatagtttttaattttgatattattaatgtgtgtgaaatgtgataagaaataaaagttattgtgtaattatgagggtagtaattattgtaatatttgaaatg

SEQ ID NO: 6869 - DNA, 120 bp, synthetic construct
  source 1..120: mol_type = other DNA
cacttaataaacccaaaattaaaacaatctctaactttaacattatcaacgtatataaaataaacaaaaaccatcgtacaactataaaaacaataattattataacacttaaaataccct

SEQ ID NO: 6870 - DNA, 120 bp, synthetic construct
  source 1..120: mol_type = other DNA
tatttaataaatttagagttgaaatagtttttaattttgatattattaacgtgtgtgaaataaataaaagttatcgtgtaattatgagggtagtaattattgtaatatttgaaatgtttt

SEQ ID NO: 6871 - DNA, 120 bp, synthetic construct
  source 1..120: mol_type = other DNA
taataaacccaaaattaaaacaatctctaactttaacattatcaacgtatataaaatataataaaaaacaaaaaccatcgtacaactataaaaacaataattattataacacttaaaata

SEQ ID NO: 6872 - DNA, 120 bp, synthetic construct
  source 1..120: mol_type = other DNA
taataaatttagagttgaaatagtttttaattttgatattattaacgtgtgtgaaatgtgataagaaataaaagttatcgtgtaattatgagggtagtaattattgtaatatttgaaatg

SEQ ID NO: 6873 - DNA, 120 bp, synthetic construct
  source 1..120: mol_type = other DNA
tataaaactttaatataacataatttcttaaaattataaacaatatcttacaatttcactacttttcataaatttaaaatcctccctcacacttatcaacacacaaaatcaatataacta

SEQ ID NO: 6874 - DNA, 120 bp, synthetic construct
  source 1..120: mol_type = other DNA
tatagaattttaatgtgatatgattttttaaaattgtgaataatgttttatagttttattattttttatgagtttaaaatttttttttatatttattagtatatagaattagtgtaattg

SEQ ID NO: 6875 - DNA, 120 bp, synthetic construct
  source 1..120: mol_type = other DNA
aactttaatataacataatttcttaaaattataaacaatatcttacaatttcactacttattttctcttttcataaatttaaaatcctccctcacacttatcaacacacaaaatcaatat

SEQ ID NO: 6876 - DNA, 120 bp, synthetic construct
  source 1..120: mol_type = other DNA
aattttaatgtgatatgattttttaaaattgtgaataatgttttatagttttattatttgttttttttttttatgagtttaaaatttttttttatatttattagtatatagaattagtgt

SEQ ID NO: 6877 - DNA, 120 bp, synthetic construct; identical to SEQ ID NO: 6873
  source 1..120: mol_type = other DNA

SEQ ID NO: 6878 - DNA, 120 bp, synthetic construct; identical to SEQ ID NO: 6874
  source 1..120: mol_type = other DNA

SEQ ID NO: 6879 - DNA, 120 bp, synthetic construct; identical to SEQ ID NO: 6875
  source 1..120: mol_type = other DNA

SEQ ID NO: 6880 - DNA, 120 bp, synthetic construct; identical to SEQ ID NO: 6876
  source 1..120: mol_type = other DNA

SEQ ID NO: 6881 - DNA, 120 bp, synthetic construct
  source 1..120: mol_type = other DNA
caatcttaaaaaccaatactccctttcatatcaacaataaaactattcattaaaataactacttcactcttcaatcttacccttcccaccccaccccctaaaaaaaccttctacctcatt

SEQ ID NO: 6882 - DNA, 120 bp, synthetic construct
  source 1..120: mol_type = other DNA
taattttagaagttagtgtttttttttatattagtaatgaaattatttattaaggtgattattttattttttagttttgttttttttattttattttttaaaaaaattttttattttatt

SEQ ID NO: 6883 - DNA, 120 bp, synthetic construct
  source 1..120: mol_type = other DNA
attacaatcttaaaaaccaatactccctttcatatcaacaataaaactattcattaaaataactcttcaatcttacccttcccaccccaccccctaaaaaaaccttctacctcattataa

SEQ ID NO: 6884 - DNA, 120 bp, synthetic construct
  source 1..120: mol_type = other DNA
attataattttagaagttagtgtttttttttatattagtaatgaaattatttattaaggtgattttttagttttgttttttttattttattttttaaaaaaattttttattttattataa

SEQ ID NO: 6885 - DNA, 120 bp, synthetic construct; identical to SEQ ID NO: 6881
  source 1..120: mol_type = other DNA

SEQ ID NO: 6886 - DNA, 120 bp, synthetic construct; identical to SEQ ID NO: 6882
  source 1..120: mol_type = other DNA

SEQ ID NO: 6887 - DNA, 120 bp, synthetic construct; identical to SEQ ID NO: 6883
  source 1..120: mol_type = other DNA

SEQ ID NO: 6888 - DNA, 120 bp, synthetic construct; identical to SEQ ID NO: 6884
  source 1..120: mol_type = other DNA

SEQ ID NO: 6889 - DNA, 120 bp, synthetic construct
  source 1..120: mol_type = other DNA
tatactttaacaaaaattaaaacccaaaaataaccctaatttctatcctaatataaataatccaatatatctaaatttccctttcttaaattaactaactcttaactaacctataaatac

SEQ ID NO: 6890 - DNA, 120 bp, synthetic construct
  source 1..120: mol_type = other DNA
tgtattttaataggggttggagtttaagaatagttttagtttttattttaatgtgagtgatttgatgtgtttagattttttttttttggattgattgatttttagttgatttgtaagtat

SEQ ID NO: 6891 - DNA, 120 bp, synthetic construct
  source 1..120: mol_type = other DNA
cttactatactttaacaaaaattaaaacccaaaaataaccctaatttctatcctaatataaatatctaaatttccctttcttaaattaactaactcttaactaacctataaatactaaca

SEQ ID NO: 6892 - DNA, 120 bp, synthetic construct
  source 1..120: mol_type = other DNA
tttgttgtattttaataggggttggagtttaagaatagttttagtttttattttaatgtgagtgtttagattttttttttttggattgattgatttttagttgatttgtaagtattaata

SEQ ID NO: 6893 - DNA, 120 bp, synthetic construct
  source 1..120: mol_type = other DNA
tatactttaacaaaaattaaaacccaaaaataaccctaatttctatcctaatataaataatccgatatatctaaatttccctttcttaaattaactaactcttaactaacctataaatac

SEQ ID NO: 6894 - DNA, 120 bp, synthetic construct
  source 1..120: mol_type = other DNA
tgtattttaataggggttggagtttaagaatagttttagtttttattttaatgtgagtgattcgatgtgtttagattttttttttttggattgattgatttttagttgatttgtaagtat

SEQ ID NO: 6895 - DNA, 120 bp, synthetic construct; identical to SEQ ID NO: 6891
  source 1..120: mol_type = other DNA

SEQ ID NO: 6896 - DNA, 120 bp, synthetic construct; identical to SEQ ID NO: 6892
  source 1..120: mol_type = other DNA

SEQ ID NO: 6897 - DNA, 120 bp, synthetic construct
  source 1..120: mol_type = other DNA
accataatttcaattctattattaaatttcccaaactttaaaaaatataaatatcatattcaaaattctaaaataatccctatcaaaaaaatataaaaccactcataaactcacaattta

SEQ ID NO: 6898 - DNA, 120 bp, synthetic construct
  source 1..120: mol_type = other DNA
attataattttagttttattattgagttttttagattttgaaaaatgtgaatattatgtttaaagttttggaatagtttttgttggaggaatatagagttatttataaatttgtaattta

SEQ ID NO: 6899 - DNA, 120 bp, synthetic construct
  source 1..120: mol_type = other DNA
aaaaaaccataatttcaattctattattaaatttcccaaactttaaaaaatataaatatcatctaaaataatccctatcaaaaaaatataaaaccactcataaactcacaatttattaaa

SEQ ID NO: 6900 - DNA, 120 bp, synthetic construct
  source 1..120: mol_type = other DNA
gaagaattataattttagttttattattgagttttttagattttgaaaaatgtgaatattatttggaatagtttttgttggaggaatatagagttatttataaatttgtaatttattgga

SEQ ID NO: 6901 - DNA, 120 bp, synthetic construct
  source 1..120: mol_type = other DNA
accataatttcaattctattattaaatttcccaaactttaaaaaatataaatatcatattcaaaattctaaaataatccctatcgaaaaaatataaaaccactcataaactcgcaattta

SEQ ID NO: 6902 - DNA, 120 bp, synthetic construct
  source 1..120: mol_type = other DNA
attataattttagttttattattgagttttttagattttgaaaaatgtgaatattatgtttaaagttttggaatagtttttgtcggaggaatatagagttatttataaattcgtaattta

SEQ ID NO: 6903 - DNA, 120 bp, synthetic construct
  source 1..120: mol_type = other DNA
aaaaaaccataatttcaattctattattaaatttcccaaactttaaaaaatataaatatcatctaaaataatccctatcgaaaaaatataaaaccactcataaactcgcaatttattaaa

SEQ ID NO: 6904 - DNA, 120 bp, synthetic construct
  source 1..120: mol_type = other DNA
gaagaattataattttagttttattattgagttttttagattttgaaaaatgtgaatattatttggaatagtttttgtcggaggaatatagagttatttataaattcgtaatttattgga

SEQ ID NO: 6905 - DNA, 120 bp, synthetic construct
  source 1..120: mol_type = other DNA
ttaaattttaaaaaatccaatctaccaaatttttttataaattacactttaaatatcaaatctttactaaaacctatatccaaaaattttatcatatttttaaaaaaaattttataattt

SEQ ID NO: 6906 - DNA, 120 bp, synthetic construct
  source 1..120: mol_type = other DNA
ttgaattttgaggaatttaatttattaagtttttttatggattgtgttttagatgttaagtttttattgaaatttatatttaaagattttattatgtttttaaaaaaagttttatagttt

SEQ ID NO: 6907 - DNA, 120 bp, synthetic construct
  source 1..120: mol_type = other DNA
ttttaaaaaatccaatctaccaaatttttttataaattacactttaaatatcaaatcttaaaaccctttactaaaacctatatccaaaaattttatcatatttttaaaaaaaattttata

SEQ ID NO: 6908 - DNA, 120 bp, synthetic construct
  source 1..120: mol_type = other DNA
ttttgaggaatttaatttattaagtttttttatggattgtgttttagatgttaagttttagagttttttattgaaatttatatttaaagattttattatgtttttaaaaaaagttttata

SEQ ID NO: 6909 - DNA, 120 bp, synthetic construct
  source 1..120: mol_type = other DNA
ttaaattttaaaaaatccaatctaccaaatttttttataaattacgctttaaatatcaaatctttactaaaacctatatccaaaaattttatcatatttttaaaaaaaattttataattt

SEQ ID NO: 6910 - DNA, 120 bp, synthetic construct
  source 1..120: mol_type = other DNA
ttgaattttgaggaatttaatttattaagtttttttatggattgcgttttagatgttaagtttttattgaaatttatatttaaagattttattatgtttttaaaaaaagttttatagttt

SEQ ID NO: 6911 - DNA, 120 bp, synthetic construct
  source 1..120: mol_type = other DNA
ttttaaaaaatccaatctaccaaatttttttataaattacgctttaaatatcaaatcttaaaaccctttactaaaacctatatccaaaaattttatcatatttttaaaaaaaattttata

SEQ ID NO: 6912 - DNA, 120 bp, synthetic construct
  source 1..120: mol_type = other DNA
ttttgaggaatttaatttattaagtttttttatggattgcgttttagatgttaagttttagagttttttattgaaatttatatttaaagattttattatgtttttaaaaaaagttttata

SEQ ID NO: 6913 - DNA, 120 bp, synthetic construct
  source 1..120: mol_type = other DNA
aaaaaaactccatacaattatatttctaatcaaaaaacatatttatacaacccatacaaaacacatatacctatacctatcttacaataaaatataccaaaaaaaatccaattccttaaa

SEQ ID NO: 6914 - DNA, 120 bp, synthetic construct
  source 1..120: mol_type = other DNA
aaaaaagttttatgtagttatatttttgattaaaaagtatgtttatgtaatttatatagagtatatgtatttgtgtttattttatagtgaaatatattaggaagaatttagttttttggg

SEQ ID NO: 6915 - DNA, 120 bp, synthetic construct
  source 1..120: mol_type = other DNA
aaaactccatacaattatatttctaatcaaaaaacatatttatacaacccatacaaaactccaccacatatacctatacctatcttacaataaaatataccaaaaaaaatccaattcctt

SEQ ID NO: 6916 - DNA, 120 bp, synthetic construct
  source 1..120: mol_type = other DNA
aaagttttatgtagttatatttttgattaaaaagtatgtttatgtaatttatatagagttttattatatgtatttgtgtttattttatagtgaaatatattaggaagaatttagtttttt

SEQ ID NO: 6917 - DNA, 120 bp, synthetic construct; identical to SEQ ID NO: 6913
  source 1..120: mol_type = other DNA

SEQ ID NO: 6918 - DNA, 120 bp, synthetic construct; identical to SEQ ID NO: 6914
  source 1..120: mol_type = other DNA

SEQ ID NO: 6919 - DNA, 120 bp, synthetic construct; identical to SEQ ID NO: 6915
  source 1..120: mol_type = other DNA

SEQ ID NO: 6920 - DNA, 120 bp, synthetic construct; identical to SEQ ID NO: 6916
  source 1..120: mol_type = other DNA

SEQ ID NO: 6921 - DNA, 120 bp, synthetic construct
  source 1..120: mol_type = other DNA
aaaaatcttctttctcaacacatttctaatttattcctactctcccaccttaaactactaccttccaaatacaaaatattacctttccaaaaaaaacaaattattctcaatctctaaaac

SEQ ID NO: 6922 - DNA, 120 bp, synthetic construct
  source 1..120: mol_type = other DNA
aaagatttttttttttaatatatttttaatttgtttttgtttttttattttgaattattattttttagatataaggtgttgtttttttaaggaagatagattatttttgatttttgaaat

SEQ ID NO: 6923 - DNA, 120 bp, synthetic construct
  source 1..120: mol_type = other DNA
ttaaaaaaaatcttctttctcaacacatttctaatttattcctactctcccaccttaaactaaatacaaaatattacctttccaaaaaaaacaaattattctcaatctctaaaaccttta

SEQ ID NO: 6924 - DNA, 120 bp, synthetic construct
  source 1..120: mol_type = other DNA
ttaaaaaagatttttttttttaatatatttttaatttgtttttgtttttttattttgaattagatataaggtgttgtttttttaaggaagatagattatttttgatttttgaaatttttg

SEQ ID NO: 6925 - DNA, 120 bp, synthetic construct
  source 1..120: mol_type = other DNA
aaaaatcttctttctcaacacatttctaatttattcctactctcccaccttaaactactaccttccaaatacaaaatattacctttccaaaaaaaacaaattattctcgatctctaaaac

SEQ ID NO: 6926 - DNA, 120 bp, synthetic construct
  source 1..120: mol_type = other DNA
aaagatttttttttttaatatatttttaatttgtttttgtttttttattttgaattattattttttagatataaggtgttgtttttttaaggaagatagattattttcgatttttgaaat

SEQ ID NO: 6927 - DNA, 120 bp, synthetic construct
  source 1..120: mol_type = other DNA
ttaaaaaaaatcttctttctcaacacatttctaatttattcctactctcccaccttaaactaaatacaaaatattacctttccaaaaaaaacaaattattctcgatctctaaaaccttta

SEQ ID NO: 6928 - DNA, 120 bp, synthetic construct
  source 1..120: mol_type = other DNA
ttaaaaaagatttttttttttaatatatttttaatttgtttttgtttttttattttgaattagatataaggtgttgtttttttaaggaagatagattattttcgatttttgaaatttttg

SEQ ID NO: 6929 - DNA, 120 bp, synthetic construct
  source 1..120: mol_type = other DNA
aatttcaaaaaaataattaaaaaaatctaaacaataaatttcatcaaatcccttttaaaaatatctaacaaacaaaaaacaacataaataaaaatacatcaaaaacaaactaaaactaaa

SEQ ID NO: 6930 - DNA, 120 bp, synthetic construct
  source 1..120: mol_type = other DNA
aattttgggaggataattgaagagatttggataataaattttattaaattttttttaaaaatgtttaataaataaagaatagtataaataaaaatatattaaaaataaattggaattaaa

SEQ ID NO: 6931 - DNA, 120 bp, synthetic construct
  source 1..120: mol_type = other DNA
tcaaaaaaataattaaaaaaatctaaacaataaatttcatcaaatcccttttaaaaatatattattatctaacaaacaaaaaacaacataaataaaaatacatcaaaaacaaactaaaac

SEQ ID NO: 6932 - DNA, 120 bp, synthetic construct
  source 1..120: mol_type = other DNA
ttgggaggataattgaagagatttggataataaattttattaaattttttttaaaaatgtattgttgtttaataaataaagaatagtataaataaaaatatattaaaaataaattggaat

SEQ ID NO: 6933 - DNA, 120 bp, synthetic construct
  source 1..120: mol_type = other DNA
aatttcgaaaaaataattaaaaaaatctaaacaataaatttcatcaaatcccttttaaaaatatctaacaaacaaaaaacaacataaataaaaatacatcaaaaacaaactaaaactaaa

SEQ ID NO: 6934 - DNA, 120 bp, synthetic construct
  source 1..120: mol_type = other DNA
aatttcgggaggataattgaagagatttggataataaattttattaaattttttttaaaaatgtttaataaataaagaatagtataaataaaaatatattaaaaataaattggaattaaa

SEQ ID NO: 6935 - DNA, 120 bp, synthetic construct
  source 1..120: mol_type = other DNA
tcgaaaaaataattaaaaaaatctaaacaataaatttcatcaaatcccttttaaaaatatattattatctaacaaacaaaaaacaacataaataaaaatacatcaaaaacaaactaaaac

SEQ ID NO: 6936 - DNA, 120 bp, synthetic construct
  source 1..120: mol_type = other DNA
tcgggaggataattgaagagatttggataataaattttattaaattttttttaaaaatgtattgttgtttaataaataaagaatagtataaataaaaatatattaaaaataaattggaat

SEQ ID NO: 6937 - DNA, 120 bp, synthetic construct
  source 1..120: mol_type = other DNA
aaaacaaaaactttatctaaattcccatttactcttaaaaccaaacataaaacctaacactttccaaattaatatttctttaataaataattaaacttaaaaataaaaactcaactaaat

SEQ ID NO: 6938 - DNA, 120 bp, synthetic construct
  source 1..120: mol_type = other DNA
aggatagggattttatttaggtttttatttatttttggagttaaatataggatttggtattttttaagttaatatttttttaatgaatagttagatttaagaatagaggtttagttgagt

SEQ ID NO: 6939 - DNA, 120 bp, synthetic construct
  source 1..120: mol_type = other DNA
caaaaactttatctaaattcccatttactcttaaaaccaaacataaaacctaacacttaataaattccaaattaatatttctttaataaataattaaacttaaaaataaaaactcaacta

SEQ ID NO: 6940 - DNA, 120 bp, synthetic construct
  source 1..120: mol_type = other DNA
tagggattttatttaggtttttatttatttttggagttaaatataggatttggtatttagtgggttttaagttaatatttttttaatgaatagttagatttaagaatagaggtttagttg

SEQ ID NO: 6941 - DNA, 120 bp, synthetic construct; identical to SEQ ID NO: 6937
  source 1..120: mol_type = other DNA

SEQ ID NO: 6942 - DNA, 120 bp, synthetic construct; identical to SEQ ID NO: 6938
  source 1..120: mol_type = other DNA

SEQ ID NO: 6943 - DNA, 120 bp, synthetic construct; identical to SEQ ID NO: 6939
  source 1..120: mol_type = other DNA

SEQ ID NO: 6944 - DNA, 120 bp, synthetic construct; identical to SEQ ID NO: 6940
  source 1..120: mol_type = other DNA

SEQ ID NO: 6945 - DNA, 120 bp, synthetic construct
  source 1..120: mol_type = other DNA
acttcctatcttataactaatctaattcctcacccaaaaaaaaaaactaaaaattatcctatcattcactaattttccttatattcatcatatcataacactccataacctaaacaacct

SEQ ID NO: 6946 - DNA, 120 bp, synthetic construct
  source 1..120: mol_type = other DNA
gttttttgttttgtggttagtttgattttttatttaagagagaaaattaaaagttattttgttatttattaattttttttatatttattatgttatggtattttatagtttagatagttt

SEQ ID NO: 6947 - DNA, 120 bp, synthetic construct
  source 1..120: mol_type = other DNA
tcctatcttataactaatctaattcctcacccaaaaaaaaaaactaaaaattatcctaaaatcttcattcactaattttccttatattcatcatatcataacactccataacctaaacaa

SEQ ID NO: 6948 - DNA, 120 bp, synthetic construct
  source 1..120: mol_type = other DNA
ttttgttttgtggttagtttgattttttatttaagagagaaaattaaaagttattttggagtttttatttattaattttttttatatttattatgttatggtattttatagtttagatag

SEQ ID NO: 6949 - DNA, 120 bp, synthetic construct; identical to SEQ ID NO: 6945
  source 1..120: mol_type = other DNA

SEQ ID NO: 6950 - DNA, 120 bp, synthetic construct; identical to SEQ ID NO: 6946
  source 1..120: mol_type = other DNA

SEQ ID NO: 6951 - DNA, 120 bp, synthetic construct; identical to SEQ ID NO: 6947
  source 1..120: mol_type = other DNA

SEQ ID NO: 6952 - DNA, 120 bp, synthetic construct; identical to SEQ ID NO: 6948
  source 1..120: mol_type = other DNA

SEQ ID NO: 6953 - DNA, 120 bp, synthetic construct
  source 1..120: mol_type = other DNA
actaatatatactaatatactattaaattcctaatacataataaacatttaacaaatattttccccaaccaaatctccaatctttaatattattatatccaaatcataatatctaatact

SEQ ID NO: 6954 - DNA, 120 bp, synthetic construct
  source 1..120: mol_type = other DNA
gttgatatatgttgatatgttgttaggtttttgatatataatgagtatttaataaatattttttttaattagatttttaatttttaatgttgttatatttagattataatatttagtatt

SEQ ID NO: 6955 - DNA, 120 bp, synthetic construct
  source 1..120: mol_type = other DNA
atatactaatatatactaatatactattaaattcctaatacataataaacatttaacaaataaccaaatctccaatctttaatattattatatccaaatcataatatctaatactatact

SEQ ID NO: 6956 - DNA, 120 bp, synthetic construct
  source 1..120: mol_type = other DNA
atatgttgatatatgttgatatgttgttaggtttttgatatataatgagtatttaataaataattagatttttaatttttaatgttgttatatttagattataatatttagtattgtgtt

SEQ ID NO: 6957 - DNA, 120 bp, synthetic construct; identical to SEQ ID NO: 6953
  source 1..120: mol_type = other DNA

SEQ ID NO: 6958 - DNA, 120 bp, synthetic construct; identical to SEQ ID NO: 6954
  source 1..120: mol_type = other DNA

SEQ ID NO: 6959 - DNA, 120 bp, synthetic construct; identical to SEQ ID NO: 6955
  source 1..120: mol_type = other DNA

SEQ ID NO: 6960 - DNA, 120 bp, synthetic construct; identical to SEQ ID NO: 6956
  source 1..120: mol_type = other DNA

SEQ ID NO: 6961 - DNA, 120 bp, synthetic construct
  source 1..120: mol_type = other DNA
ttcctcatcttaaaataaatttaaaccccatacattcctattatcttttactttatctatactaacacatcattatccccttccacaaaaaaaaaaacatcatctcacccataataacac

SEQ ID NO: 6962 - DNA, 120 bp, synthetic construct
  source 1..120: mol_type = other DNA
ttttttgttttggggtggatttgggttttatgtatttttgttgttttttattttgtttgtgttaatatattattgtttttttttataggaagggaaatattattttatttatgatggtat

SEQ ID NO: 6963 - DNA, 120 bp, synthetic construct
  source 1..120: mol_type = other DNA
catcttaaaataaatttaaaccccatacattcctattatcttttactttatctataaaactttctctaacacatcattatccccttccacaaaaaaaaaaacatcatctcacccataata

SEQ ID NO: 6964 - DNA, 120 bp, synthetic construct
  source 1..120: mol_type = other DNA
tgttttggggtggatttgggttttatgtatttttgttgttttttattttgtttgtgaaattttttttaatatattattgtttttttttataggaagggaaatattattttatttatgatg

SEQ ID NO: 6965 - DNA, 120 bp, synthetic construct
  source 1..120: mol_type = other DNA
ttcctcgtcttaaaataaatttaaaccccatacattcctattatcttttactttatctatactaacacatcattatccccttccacaaaaaaaaaaacatcatctcacccataataacac

SEQ ID NO: 6966 - DNA, 120 bp, synthetic construct
  source 1..120: mol_type = other DNA
tttttcgttttggggtggatttgggttttatgtatttttgttgttttttattttgtttgtgttaatatattattgtttttttttataggaagggaaatattattttatttatgatggtat

SEQ ID NO: 6967 - DNA, 120 bp, synthetic construct
  source 1..120: mol_type = other DNA
cgtcttaaaataaatttaaaccccatacattcctattatcttttactttatctataaaactttctctaacacatcattatccccttccacaaaaaaaaaaacatcatctcacccataata

SEQ ID NO: 6968 - DNA, 120 bp, synthetic construct
  source 1..120: mol_type = other DNA
cgttttggggtggatttgggttttatgtatttttgttgttttttattttgtttgtgaaattttttttaatatattattgtttttttttataggaagggaaatattattttatttatgatg

SEQ ID NO: 6969 - DNA, 120 bp, synthetic construct
  source 1..120: mol_type = other DNA
tataaccactacatattttcatatacaccaaaaacaaactcacccacccacaacaaccaccactaccacaactaaaaccaaaactcaaataaaatacacattccccaaaacatctaacat

SEQ ID NO: 6970 - DNA, 120 bp, synthetic construct
  source 1..120: mol_type = other DNA
tgtagttattgtatgtttttatgtgtattaaggataaatttatttatttatagtagttattgttattgtagttggggttaaagtttaaatgaagtatatattttttgaaatgtttggtat

SEQ ID NO: 6971 - DNA, 120 bp, synthetic construct
  source 1..120: mol_type = other DNA
accactacatattttcatatacaccaaaaacaaactcacccacccacaacaaccaccaccataaactaccacaactaaaaccaaaactcaaataaaatacacattccccaaaacatctaa

SEQ ID NO: 6972 - DNA, 120 bp, synthetic construct
  source 1..120: mol_type = other DNA
gttattgtatgtttttatgtgtattaaggataaatttatttatttatagtagttattattatgggttattgtagttggggttaaagtttaaatgaagtatatattttttgaaatgtttgg

SEQ ID NO: 6973 - DNA, 120 bp, synthetic construct
  source 1..120: mol_type = other DNA
tataaccactacatattttcatatacaccaaaaacaaactcacccacccacaacaaccaccgctaccgcaactaaaaccaaaactcaaataaaatacacattccccgaaacgtctaacat

SEQ ID NO: 6974 - DNA, 120 bp, synthetic construct
  source 1..120: mol_type = other DNA
tgtagttattgtatgtttttatgtgtattaaggataaatttatttatttatagtagttatcgttatcgtagttggggttaaagtttaaatgaagtatatatttttcgaaacgtttggtat

SEQ ID NO: 6975 - DNA, 120 bp, synthetic construct
  source 1..120: mol_type = other DNA
accactacatattttcatatacaccaaaaacaaactcacccacccacaacaaccaccaccataaactaccgcaactaaaaccaaaactcaaataaaatacacattccccgaaacgtctaa

SEQ ID NO: 6976 - DNA, 120 bp, synthetic construct
  source 1..120: mol_type = other DNA
gttattgtatgtttttatgtgtattaaggataaatttatttatttatagtagttattattatgggttatcgtagttggggttaaagtttaaatgaagtatatatttttcgaaacgtttgg

SEQ ID NO: 6977 - DNA, 120 bp, synthetic construct
  source 1..120: mol_type = other DNA
aaaacaaaaaaaaataaaattccacaaataaaaaaaaccaaattataaaaataattatataaaataataaattacatactaactattatctaaccaacactattttaatacaaaatccta

SEQ ID NO: 6978 - DNA, 120 bp, synthetic construct
  source 1..120: mol_type = other DNA
ggagtaggaggagataaagttttataggtagagagggttaaattgtgaagatagttgtatgaaataataagttatatattgattattgtttggttagtattgttttaatgtagggttttg

SEQ ID NO: 6979 - DNA, 120 bp, synthetic construct
  source 1..120: mol_type = other DNA
aaaaaaaacaaaaaaaaataaaattccacaaataaaaaaaaccaaattataaaaataattaaataaattacatactaactattatctaaccaacactattttaatacaaaatcctactaa

SEQ ID NO: 6980 - DNA, 120 bp, synthetic construct
  source 1..120: mol_type = other DNA
aggaggagtaggaggagataaagttttataggtagagagggttaaattgtgaagatagttgaataagttatatattgattattgtttggttagtattgttttaatgtagggttttgttgg

SEQ ID NO: 6981 - DNA, 120 bp, synthetic construct; identical to SEQ ID NO: 6977
  source 1..120: mol_type = other DNA

SEQ ID NO: 6982 - DNA, 120 bp, synthetic construct; identical to SEQ ID NO: 6978
  source 1..120: mol_type = other DNA

SEQ ID NO: 6983 - DNA, 120 bp, synthetic construct; identical to SEQ ID NO: 6979
  source 1..120: mol_type = other DNA

SEQ ID NO: 6984 - DNA, 120 bp, synthetic construct; identical to SEQ ID NO: 6980
  source 1..120: mol_type = other DNA

SEQ ID NO: 6985 - DNA, 120 bp, synthetic construct
  source 1..120: mol_type = other DNA
ctaaaaaaacaaaataaacacaaaaccaaacatcaaacccctacctaaaaccaaacccctacctttaccaaattctctaaccttaaataataaaaccctacctcccccaatctcctcctt

SEQ ID NO: 6986 - DNA, 120 bp, synthetic construct
  source 1..120: mol_type = other DNA
ttgaagaggtagaatggatatggggttaggtattaaatttttgtttgggattagatttttgtttttgttaaattttttggttttgggtaatgagattttgttttttttaatttttttttt

SEQ ID NO: 6987 - DNA, 120 bp, synthetic construct
  source 1..120: mol_type = other DNA
aaaacaaaataaacacaaaaccaaacatcaaacccctacctaaaaccaaacccctacctatcccttcctttaccaaattctctaaccttaaataataaaaccctacctcccccaatctcc

SEQ ID NO: 6988 - DNA, 120 bp, synthetic construct
  source 1..120: mol_type = other DNA
gaggtagaatggatatggggttaggtattaaatttttgtttgggattagatttttgtttatttttttttttgttaaattttttggttttgggtaatgagattttgttttttttaattttt

SEQ ID NO: 6989 - DNA, 120 bp, synthetic construct
  source 1..120: mol_type = other DNA
ctaaaaaaacaaaataaacacgaaaccaaacatcaaacccctacctaaaaccaaacccctacctttaccaaattctctaaccttaaataataaaaccctacctcccccaatctcctcctt

SEQ ID NO: 6990 - DNA, 120 bp, synthetic construct
  source 1..120: mol_type = other DNA
ttgaagaggtagaatggatacggggttaggtattaaatttttgtttgggattagatttttgtttttgttaaattttttggttttgggtaatgagattttgttttttttaatttttttttt

SEQ ID NO: 6991 - DNA, 120 bp, synthetic construct
  source 1..120: mol_type = other DNA
aaaacaaaataaacacgaaaccaaacatcaaacccctacctaaaaccaaacccctacctatcccttcctttaccaaattctctaaccttaaataataaaaccctacctcccccaatctcc

SEQ ID NO: 6992 - DNA, 120 bp, synthetic construct
  source 1..120: mol_type = other DNA
gaggtagaatggatacggggttaggtattaaatttttgtttgggattagatttttgtttatttttttttttgttaaattttttggttttgggtaatgagattttgttttttttaattttt

SEQ ID NO: 6993 - DNA, 120 bp, synthetic construct
  source 1..120: mol_type = other DNA
aaataaataaataaataaatattttattaaaatcaacaaccaatcaaatatctatctaccaaattataaaaataaatctaaaaaaaactatatacttaaaaaaatatactttatacatcc

SEQ ID NO: 6994 - DNA, 120 bp, synthetic construct
  source 1..120: mol_type = other DNA
gaataaatggatgaatgaatattttattaggattaataattaattaagtgtttatttgttaaattataaggatgaatttgagaaaaattatgtgtttagagaaatgtgttttatgtattt

SEQ ID NO: 6995 - DNA, 120 bp, synthetic construct
  source 1..120: mol_type = other DNA
aataaataaataaatattttattaaaatcaacaaccaatcaaatatctatctaccaaaaatataacaattataaaaataaatctaaaaaaaactatatacttaaaaaaatatactttata

SEQ ID NO: 6996 - DNA, 120 bp, synthetic construct
  source 1..120: mol_type = other DNA
aatggatgaatgaatattttattaggattaataattaattaagtgtttatttgttaagaatatggtaattataaggatgaatttgagaaaaattatgtgtttagagaaatgtgttttatg

SEQ ID NO: 6997 - DNA, 120 bp, synthetic construct; identical to SEQ ID NO: 6993
  source 1..120: mol_type = other DNA

SEQ ID NO: 6998 - DNA, 120 bp, synthetic construct; identical to SEQ ID NO: 6994
  source 1..120: mol_type = other DNA

SEQ ID NO: 6999 - DNA, 120 bp, synthetic construct; identical to SEQ ID NO: 6995
  source 1..120: mol_type = other DNA

SEQ ID NO: 7000 - DNA, 120 bp, synthetic construct; identical to SEQ ID NO: 6996
  source 1..120: mol_type = other DNA

SEQ ID NO: 7001 - DNA, 120 bp, synthetic construct
  source 1..120: mol_type = other DNA
acatcaatcacataaaaaaaaaaacaaaaaataatctcaaatattctaaaatcactctaatatacataaaaaaaccaaccaaaaaaaaaaaactataatatctaaaaaattcctaaacct

SEQ ID NO: 7002 - DNA, 120 bp, synthetic construct
  source 1..120: mol_type = other DNA
gtattagttatataggggaggggatagaggatggttttaagtgttttgaaattattttaatgtatgtagaggggttaattagaagagggaagttatagtgtttaaagagtttttgagttt

SEQ ID NO: 7003 - DNA, 120 bp, synthetic construct
  source 1..120: mol_type = other DNA
tcaaacatcaatcacataaaaaaaaaaacaaaaaataatctcaaatattctaaaatcactctaaaaaaaccaaccaaaaaaaaaaaactataatatctaaaaaattcctaaacctctaat

SEQ ID NO: 7004 - DNA, 120 bp, synthetic construct
  source 1..120: mol_type = other DNA
ttaagtattagttatataggggaggggatagaggatggttttaagtgttttgaaattattttagaggggttaattagaagagggaagttatagtgtttaaagagtttttgagtttttgat

SEQ ID NO: 7005 - DNA, 120 bp, synthetic construct
  source 1..120: mol_type = other DNA
acatcaatcacataaaaaaaaaaacaaaaaataatctcaaatattctaaaatcactctaatatacgtaaaaaaaccaaccaaaaaaaaaaaactataatatctaaaaaattcctaaacct

SEQ ID NO: 7006 - DNA, 120 bp, synthetic construct
  source 1..120: mol_type = other DNA
gtattagttatataggggaggggatagaggatggttttaagtgttttgaaattattttaatgtacgtagaggggttaattagaagagggaagttatagtgtttaaagagtttttgagttt

SEQ ID NO: 7007 - DNA, 120 bp, synthetic construct; identical to SEQ ID NO: 7003
  source 1..120: mol_type = other DNA

SEQ ID NO: 7008 - DNA, 120 bp, synthetic construct; identical to SEQ ID NO: 7004
  source 1..120: mol_type = other DNA

SEQ ID NO: 7009 - DNA, 120 bp, synthetic construct
  source 1..120: mol_type = other DNA
attctataatatttaatatttataacttattcctatattatccctattatcaaaataaatttttctccttttcatatcctaaaaaaattattttcttactcaatttaaacaaaaacctcc

SEQ ID NO: 7010 - DNA, 120 bp, synthetic construct
  source 1..120: mol_type = other DNA
gttttataatgtttagtgtttataatttatttttgtgttatttttattattagagtaggttttttttttttttatattttgaaaaaattatttttttgtttgatttgaataggaattttt

SEQ ID NO: 7011 - DNA, 120 bp, synthetic construct
  source 1..120: mol_type = other DNA
cactattctataatatttaatatttataacttattcctatattatccctattatcaaaatatccttttcatatcctaaaaaaattattttcttactcaatttaaacaaaaacctcctata

SEQ ID NO: 7012 - DNA, 120 bp, synthetic construct
  source 1..120: mol_type = other DNA
tattgttttataatgtttagtgtttataatttatttttgtgttatttttattattagagtattttttttatattttgaaaaaattatttttttgtttgatttgaataggaattttttatg

SEQ ID NO: 7013 - DNA, 120 bp, synthetic construct
  source 1..120: mol_type = other DNA
attctataatatttaatatttataacttattcctatattatccctattatcaaaataaatttttctccttttcatatcctaaaaaaattattttcttactcgatttaaacaaaaacctcc

SEQ ID NO: 7014 - DNA, 120 bp, synthetic construct
  source 1..120: mol_type = other DNA
gttttataatgtttagtgtttataatttatttttgtgttatttttattattagagtaggttttttttttttttatattttgaaaaaattatttttttgttcgatttgaataggaattttt

SEQ ID NO: 7015 - DNA, 120 bp, synthetic construct
  source 1..120: mol_type = other DNA
cactattctataatatttaatatttataacttattcctatattatccctattatcaaaatatccttttcatatcctaaaaaaattattttcttactcgatttaaacaaaaacctcctata

SEQ ID NO: 7016 - DNA, 120 bp, synthetic construct
  source 1..120: mol_type = other DNA
tattgttttataatgtttagtgtttataatttatttttgtgttatttttattattagagtattttttttatattttgaaaaaattatttttttgttcgatttgaataggaattttttatg

SEQ ID NO: 7017 - DNA, 120 bp, synthetic construct
  source 1..120: mol_type = other DNA
aaaactttcccaaaaaaaaaactttcccaaacctaaaaaataaaaaaaaaaaacaaaaaaaactccctttcccacttcccaaccacccatcccaaccctcaacctccactacacaaccca

SEQ ID NO: 7018 - DNA, 120 bp, synthetic construct
  source 1..120: mol_type = other DNA
ggggtttttttaaaaggaaaatttttttaaatttgggggatgggaagagaagataaaaggagtttttttttttattttttagttgtttgttttagtttttggtttttgttgtgtgatttg

SEQ ID NO: 7019 - DNA, 120 bp, synthetic construct
  source 1..120: mol_type = other DNA
tttcccaaaaaaaaaactttcccaaacctaaaaaataaaaaaaaaaaacaaaaaaaacacctctaactccctttcccacttcccaaccacccatcccaaccctcaacctccactacacaa

SEQ ID NO: 7020 - DNA, 120 bp, synthetic construct
  source 1..120: mol_type = other DNA
ttttttaaaaggaaaatttttttaaatttgggggatgggaagagaagataaaaggagtgtttttggtttttttttttattttttagttgtttgttttagtttttggtttttgttgtgtga

SEQ ID NO: 7021 - DNA, 120 bp, synthetic construct
  source 1..120: mol_type = other DNA
aaaactttcccaaaaaaaaaactttcccaaacctaaaaaataaaaaaaaaaaacaaaaaaaactccctttcccacttcccaaccgcccgtcccaaccctcgacctccgctacgcgacccg

SEQ ID NO: 7022 - DNA, 120 bp, synthetic construct
  source 1..120: mol_type = other DNA
ggggtttttttaaaaggaaaatttttttaaatttgggggatgggaagagaagataaaaggagtttttttttttattttttagtcgttcgttttagttttcggttttcgttgcgcgattcg

SEQ ID NO: 7023 - DNA, 120 bp, synthetic construct
  source 1..120: mol_type = other DNA
tttcccaaaaaaaaaactttcccaaacctaaaaaataaaaaaaaaaaacaaaaaaaacgcctctaactccctttcccacttcccaaccgcccgtcccaaccctcgacctccgctacgcga

SEQ ID NO: 7024 - DNA, 120 bp, synthetic construct
  source 1..120: mol_type = other DNA
ttttttaaaaggaaaatttttttaaatttgggggatgggaagagaagataaaaggagcgtttttggtttttttttttattttttagtcgttcgttttagttttcggttttcgttgcgcga

SEQ ID NO: 7025 - DNA, 120 bp, synthetic construct
  source 1..120: mol_type = other DNA
tttaaacttaacataactacaccattatatttctacccaaaatttctaacattaatatcttaatatttatctttaaattttaatttatcaaaaaaatacaaaaaaaataacttattccat

SEQ ID NO: 7026 - DNA, 120 bp, synthetic construct
  source 1..120: mol_type = other DNA
tttaaatttagtatagttatattattatgtttttatttaaaatttttaatattagtattttaatatttatttttgaattttggtttattaaaagggtataaagaaaatggtttattttat

SEQ ID NO: 7027 - DNA, 120 bp, synthetic construct
  source 1..120: mol_type = other DNA
aacatttaaacttaacataactacaccattatatttctacccaaaatttctaacattaatattatctttaaattttaatttatcaaaaaaatacaaaaaaaataacttattccatacaca

SEQ ID NO: 7028 - DNA, 120 bp, synthetic construct
  source 1..120: mol_type = other DNA
aatatttaaatttagtatagttatattattatgtttttatttaaaatttttaatattagtattatttttgaattttggtttattaaaagggtataaagaaaatggtttattttatgtata

SEQ ID NO: 7029 - DNA, 120 bp, synthetic construct; identical to SEQ ID NO: 7025
  source 1..120: mol_type = other DNA

SEQ ID NO: 7030 - DNA, 120 bp, synthetic construct; identical to SEQ ID NO: 7026
  source 1..120: mol_type = other DNA

SEQ ID NO: 7031 - DNA, 120 bp, synthetic construct; identical to SEQ ID NO: 7027
  source 1..120: mol_type = other DNA

SEQ ID NO: 7032 - DNA, 120 bp, synthetic construct; identical to SEQ ID NO: 7028
  source 1..120: mol_type = other DNA

SEQ ID NO: 7033 - DNA, 120 bp, synthetic construct
  source 1..120: mol_type = other DNA
aaacaaccataacccataaataacctaataataaatataaaaataaactaaaacctcattcccaaatcaaattctatataaatataaattctaatttccaactatatcaaaaccaacaaa

SEQ ID NO: 7034 - DNA, 120 bp, synthetic construct
  source 1..120: mol_type = other DNA
aagtaattgtagtttataaatagtttgatgatggatgtgggaatgagttgggattttatttttaggttagattttatgtgaatatgggttttggtttttaattatgttagggttagtaga

SEQ ID NO: 7035 - DNA, 120 bp, synthetic construct
  source 1..120: mol_type = other DNA
accataacccataaataacctaataataaatataaaaataaactaaaacctcattcccaaaccacaccaaatcaaattctatataaatataaattctaatttccaactatatcaaaacca

SEQ ID NO: 7036 - DNA, 120 bp, synthetic construct
  source 1..120: mol_type = other DNA
attgtagtttataaatagtttgatgatggatgtgggaatgagttgggattttatttttagattatattaggttagattttatgtgaatatgggttttggtttttaattatgttagggtta

SEQ ID NO: 7037 - DNA, 120 bp, synthetic construct
  source 1..120: mol_type = other DNA
aaacaaccgtaacccataaataacctaataataaatataaaaataaactaaaacctcattcccaaatcaaattctatataaatataaattctaatttccaactatatcaaaaccaacaaa

SEQ ID NO: 7038 - DNA, 120 bp, synthetic construct
  source 1..120: mol_type = other DNA
aagtaatcgtagtttataaatagtttgatgatggatgtgggaatgagttgggattttatttttaggttagattttatgtgaatatgggttttggtttttaattatgttagggttagtaga

SEQ ID NO: 7039 - DNA, 120 bp, synthetic construct
  source 1..120: mol_type = other DNA
accgtaacccataaataacctaataataaatataaaaataaactaaaacctcattcccaaaccacaccaaatcaaattctatataaatataaattctaatttccaactatatcaaaacca

SEQ ID NO: 7040 - DNA, 120 bp, synthetic construct
  source 1..120: mol_type = other DNA
atcgtagtttataaatagtttgatgatggatgtgggaatgagttgggattttatttttagattatattaggttagattttatgtgaatatgggttttggtttttaattatgttagggtta

SEQ ID NO: 7041 - DNA, 120 bp, synthetic construct
  source 1..120: mol_type = other DNA
actaattcacatctatcaaaaattaacattaaaataaaaaaataaaatatcaactaaccctaattctctaaattcccaaacccaataacacaaccaaacaccataactcccaaaaaaact

SEQ ID NO: 7042 - DNA, 120 bp, synthetic construct
  source 1..120: mol_type = other DNA
attggtttgtatttattaagggttggtgttgggataagagggtgaagtattagttggttttgattttttgaatttttggatttaataatgtgattaagtattgtgatttttaggaaaatt

SEQ ID NO: 7043 - DNA, 120 bp, synthetic construct
  source 1..120: mol_type = other DNA
ttcacatctatcaaaaattaacattaaaataaaaaaataaaatatcaactaaccctaaacaacaaaattctctaaattcccaaacccaataacacaaccaaacaccataactcccaaaaa

SEQ ID NO: 7044 - DNA, 120 bp, synthetic construct
  source 1..120: mol_type = other DNA
tttgtatttattaagggttggtgttgggataagagggtgaagtattagttggttttggataatgagattttttgaatttttggatttaataatgtgattaagtattgtgatttttaggaa

SEQ ID NO: 7045 - DNA, 120 bp, synthetic construct
  source 1..120: mol_type = other DNA
actaattcgcatctatcaaaaattaacgttaaaataaaaaaataaaatatcaactaaccctaattctctaaattcccgaacccaataacgcgaccaaacaccgtaactcccaaaaaaact

SEQ ID NO: 7046 - DNA, 120 bp, synthetic construct
  source 1..120: mol_type = other DNA
attggttcgtatttattaagggttggcgttgggataagagggtgaagtattagttggttttgattttttgaattttcggatttaataacgcgattaagtatcgtgatttttaggaaaatt

SEQ ID NO: 7047 - DNA, 120 bp, synthetic construct
  source 1..120: mol_type = other DNA
ttcgcatctatcaaaaattaacgttaaaataaaaaaataaaatatcaactaaccctaaacaacgaaattctctaaattcccgaacccaataacgcgaccaaacaccgtaactcccaaaaa

SEQ ID NO: 7048 - DNA, 120 bp, synthetic construct
  source 1..120: mol_type = other DNA
ttcgtatttattaagggttggcgttgggataagagggtgaagtattagttggttttggataacgagattttttgaattttcggatttaataacgcgattaagtatcgtgatttttaggaa

SEQ ID NO: 7049 - DNA, 120 bp, synthetic construct
  source 1..120: mol_type = other DNA
aactattacaaatatacaaaaaactctaaacacattattattactaaaatattttcataaacacatccaataatatattaaaaaattaataaacttaaattcttaatatcctaaaccctt

SEQ ID NO: 7050 - DNA, 120 bp, synthetic construct
  source 1..120: mol_type = other DNA
agttgttatagatatgtaaagggttttaggtatattattgttgttgaggtgtttttatggatatatttagtggtgtattagagaattgatagatttgggtttttagtattttggattttt

SEQ ID NO: 7051 - DNA, 120 bp, synthetic construct
  source 1..120: mol_type = other DNA
ttacaaatatacaaaaaactctaaacacattattattactaaaatattttcataaacacaaataccacatccaataatatattaaaaaattaataaacttaaattcttaatatcctaaac

SEQ ID NO: 7052 - DNA, 120 bp, synthetic construct
  source 1..120: mol_type = other DNA
ttatagatatgtaaagggttttaggtatattattgttgttgaggtgtttttatggatataggtattatatttagtggtgtattagagaattgatagatttgggtttttagtattttggat

SEQ ID NO: 7053 - DNA, 120 bp, synthetic construct; identical to SEQ ID NO: 7049
  source 1..120: mol_type = other DNA

SEQ ID NO: 7054 - DNA, 120 bp, synthetic construct; identical to SEQ ID NO: 7050
  source 1..120: mol_type = other DNA

SEQ ID NO: 7055 - DNA, 120 bp, synthetic construct; identical to SEQ ID NO: 7051
  source 1..120: mol_type = other DNA

SEQ ID NO: 7056 - DNA, 120 bp, synthetic construct; identical to SEQ ID NO: 7052
  source 1..120: mol_type = other DNA

SEQ ID NO: 7057 - DNA, 120 bp, synthetic construct
  source 1..120: mol_type = other DNA
cttacctccctccaacctccattccaaaaatcctactcctaaccaaaatcctatatataatctaataacaaaaccttacctaaaaaacctcccaaaaaccactaccatccccaccctaaa

SEQ ID NO: 7058 - DNA, 120 bp, synthetic construct
  source 1..120: mol_type = other DNA
tttgtttttttttagtttttgttttaggagttttgtttttggttaaaattttatgtgtgatttgatggtaaggttttgtttgggagattttttggggattattgttatttttattttaga

SEQ ID NO: 7059 - DNA, 120 bp, synthetic construct
  source 1..120: mol_type = other DNA
ctccctccaacctccattccaaaaatcctactcctaaccaaaatcctatatataatccattcaaacctaataacaaaaccttacctaaaaaacctcccaaaaaccactaccatccccacc

SEQ ID NO: 7060 - DNA, 120 bp, synthetic construct
  source 1..120: mol_type = other DNA
ttttttttagtttttgttttaggagttttgtttttggttaaaattttatgtgtgatttatttagatttgatggtaaggttttgtttgggagattttttggggattattgttatttttatt

SEQ ID NO: 7061 - DNA, 120 bp, synthetic construct
  source 1..120: mol_type = other DNA
cttacctccctccaacctccgttccaaaaatcctactcctaaccaaaatcctatatataatctaataacaaaaccttacctaaaaaacctcccgaaaaccactaccatccccaccctaaa

SEQ ID NO: 7062 - DNA, 120 bp, synthetic construct
  source 1..120: mol_type = other DNA
tttgtttttttttagttttcgttttaggagttttgtttttggttaaaattttatgtgtgatttgatggtaaggttttgtttgggagatttttcggggattattgttatttttattttaga

SEQ ID NO: 7063 - DNA, 120 bp, synthetic construct
  source 1..120: mol_type = other DNA
ctccctccaacctccgttccaaaaatcctactcctaaccaaaatcctatatataatccattcaaacctaataacaaaaccttacctaaaaaacctcccgaaaaccactaccatccccacc

SEQ ID NO: 7064 - DNA, 120 bp, synthetic construct
  source 1..120: mol_type = other DNA
ttttttttagttttcgttttaggagttttgtttttggttaaaattttatgtgtgatttatttagatttgatggtaaggttttgtttgggagatttttcggggattattgttatttttatt

SEQ ID NO: 7065 - DNA, 120 bp, synthetic construct
  source 1..120: mol_type = other DNA
catataccaaataacaaaattcaaaaaaatcccactacataaaaacaataaaacaaccttcaaaaaaaaatttaatacaaataaaaaaacaaacttccttacatacaaattaataaacta

SEQ ID NO: 7066 - DNA, 120 bp, synthetic construct
  source 1..120: mol_type = other DNA
tatatgttaggtgatagaatttagaggggttttattatgtgaaaataatagaataatttttgaaaagaaatttagtataaataagagggtaggtttttttatatataagttagtaaattg

SEQ ID NO: 7067 - DNA, 120 bp, synthetic construct
  source 1..120: mol_type = other DNA
accaaataacaaaattcaaaaaaatcccactacataaaaacaataaaacaaccttcaaaaattaataaaaaaaaatttaatacaaataaaaaaacaaacttccttacatacaaattaata

SEQ ID NO: 7068 - DNA, 120 bp, synthetic construct
  source 1..120: mol_type = other DNA
gttaggtgatagaatttagaggggttttattatgtgaaaataatagaataatttttaaaagttgatgaaaagaaatttagtataaataagagggtaggtttttttatatataagttagta

SEQ ID NO: 7069 - DNA, 120 bp, synthetic construct
  source 1..120: mol_type = other DNA
catataccaaataacaaaattcaaaaaaatcccactacgtaaaaacaataaaacaaccttcgaaaaaaaatttaatacaaataaaaaaacaaacttccttacatacaaattaataaacta

SEQ ID NO: 7070 - DNA, 120 bp, synthetic construct
  source 1..120: mol_type = other DNA
tatatgttaggtgatagaatttagaggggttttattacgtgaaaataatagaataattttcgaaaagaaatttagtataaataagagggtaggtttttttatatataagttagtaaattg

SEQ ID NO: 7071 - DNA, 120 bp, synthetic construct
  source 1..120: mol_type = other DNA
accaaataacaaaattcaaaaaaatcccactacgtaaaaacaataaaacaaccttcaaaaattaataaaaaaaaatttaatacaaataaaaaaacaaacttccttacatacaaattaata

SEQ ID NO: 7072 - DNA, 120 bp, synthetic construct
  source 1..120: mol_type = other DNA
gttaggtgatagaatttagaggggttttattacgtgaaaataatagaataatttttaaaagttgatgaaaagaaatttagtataaataagagggtaggtttttttatatataagttagta

SEQ ID NO: 7073 - DNA, 120 bp, synthetic construct
  source 1..120: mol_type = other DNA
actttatttataatccaaaatctaattttaaatccatataactattttcacatctattctacaattcaacaaataataaaatataacatcaattttttcctataattaaaacattaaata

SEQ ID NO: 7074 - DNA, 120 bp, synthetic construct
  source 1..120: mol_type = other DNA
gttttatttatggtttaaaatttagttttgaatttgtatgattatttttatatttattttataatttagtaaataataaagtgtggtattaatttttttttataattgaaatattaaata

SEQ ID NO: 7075 - DNA, 120 bp, synthetic construct
  source 1..120: mol_type = other DNA
atttataatccaaaatctaattttaaatccatataactattttcacatctattctacatttaaatcaattcaacaaataataaaatataacatcaattttttcctataattaaaacatta

SEQ ID NO: 7076 - DNA, 120 bp, synthetic construct
  source 1..120: mol_type = other DNA
atttatggtttaaaatttagttttgaatttgtatgattatttttatatttattttatatttgaattaatttagtaaataataaagtgtggtattaatttttttttataattgaaatatta

SEQ ID NO: 7077 - DNA, 120 bp, synthetic construct
  source 1..120: mol_type = other DNA
actttatttataatccaaaatctaattttaaatccgtataactattttcacatctattctacaattcaacaaataataaaatataacatcaattttttcctataattaaaacattaaata

SEQ ID NO: 7078 - DNA, 120 bp, synthetic construct
  source 1..120: mol_type = other DNA
gttttatttatggtttaaaatttagttttgaattcgtatgattatttttatatttattttataatttagtaaataataaagtgtggtattaatttttttttataattgaaatattaaata

SEQ ID NO: 7079 - DNA, 120 bp, synthetic construct
  source 1..120: mol_type = other DNA
atttataatccaaaatctaattttaaatccgtataactattttcacatctattctacatttaaatcaattcaacaaataataaaatataacatcaattttttcctataattaaaacatta

SEQ ID NO: 7080 - DNA, 120 bp, synthetic construct
  source 1..120: mol_type = other DNA
atttatggtttaaaatttagttttgaattcgtatgattatttttatatttattttatatttgaattaatttagtaaataataaagtgtggtattaatttttttttataattgaaatatta

SEQ ID NO: 7081 - DNA, 120 bp, synthetic construct
  source 1..120: mol_type = other DNA
tattaaatcacttacccccaccccattaaatcaattccaaataaataataaaaaaataaaacaataaaaacatccttaaaaaaataaaaaaaaaacaaaccacaaaataacaaaaattat

SEQ ID NO: 7082 - DNA, 120 bp, synthetic construct
  source 1..120: mol_type = other DNA
tattggattatttatttttattttattggattaattttagatggataatagaaaagtaaaataataaaaatatttttaagagagtgggaaaaaaataagttataaagtgataaaagttat

SEQ ID NO: 7083 - DNA, 120 bp, synthetic construct
  source 1..120: mol_type = other DNA
aaaatattaaatcacttacccccaccccattaaatcaattccaaataaataataaaaaaataaaacatccttaaaaaaataaaaaaaaaacaaaccacaaaataacaaaaattatttaca

SEQ ID NO: 7084 - DNA, 120 bp, synthetic construct
  source 1..120: mol_type = other DNA
aaaatattggattatttatttttattttattggattaattttagatggataatagaaaagtaaaatatttttaagagagtgggaaaaaaataagttataaagtgataaaagttatttata

SEQ ID NO: 7085 - DNA, 120 bp, synthetic construct; identical to SEQ ID NO: 7081
  source 1..120: mol_type = other DNA

SEQ ID NO: 7086 - DNA, 120 bp, synthetic construct; identical to SEQ ID NO: 7082
  source 1..120: mol_type = other DNA

SEQ ID NO: 7087 - DNA, 120 bp, synthetic construct; identical to SEQ ID NO: 7083
  source 1..120: mol_type = other DNA

SEQ ID NO: 7088 - DNA, 120 bp, synthetic construct; identical to SEQ ID NO: 7084
  source 1..120: mol_type = other DNA

SEQ ID NO: 7089 - DNA, 120 bp, synthetic construct
  source 1..120: mol_type = other DNA
aaaataacaaaacactcctatccctcccaataaaaaaaaaacaaaataaaaattacatccaacctttcctcactaatcatacaaataaaaaaaaaataaaattaaataaaatattaaaaa

SEQ ID NO: 7090 - DNA, 120 bp, synthetic construct
  source 1..120: mol_type = other DNA
gaaatagtaaggtatttttgttttttttaatgagagagggataagataggaattatatttagtttttttttattaattatataagtaaggagagagtggagttagataaagtgttgagag

SEQ ID NO: 7091 - DNA, 120 bp, synthetic construct
  source 1..120: mol_type = other DNA
taaaaaaataacaaaacactcctatccctcccaataaaaaaaaaacaaaataaaaattacatcctcactaatcatacaaataaaaaaaaaataaaattaaataaaatattaaaaaaaaaa

SEQ ID NO: 7092 - DNA, 120 bp, synthetic construct
  source 1..120: mol_type = other DNA
tgaagaaatagtaaggtatttttgttttttttaatgagagagggataagataggaattatatttttattaattatataagtaaggagagagtggagttagataaagtgttgagagaaaga

SEQ ID NO: 7093 - DNA, 120 bp, synthetic construct; identical to SEQ ID NO: 7089
  source 1..120: mol_type = other DNA

SEQ ID NO: 7094 - DNA, 120 bp, synthetic construct; identical to SEQ ID NO: 7090
  source 1..120: mol_type = other DNA

SEQ ID NO: 7095 - DNA, 120 bp, synthetic construct; identical to SEQ ID NO: 7091
  source 1..120: mol_type = other DNA

SEQ ID NO: 7096 - DNA, 120 bp, synthetic construct; identical to SEQ ID NO: 7092
  source 1..120: mol_type = other DNA

SEQ ID NO: 7097 - DNA, 120 bp, synthetic construct
  source 1..120: mol_type = other DNA
aaaataaacactaataataaaaacaactcacccctaactaaaaaaaaaaaaaaataattcccaataacattacctacttccctatcccccaaaaaccccctacaccccaactcaaacata

SEQ ID NO: 7098 - DNA, 120 bp, synthetic construct
  source 1..120: mol_type = other DNA
agagtgaatattgatggtgagagtagtttatttttgattgaagggagagagaagtgatttttagtggtattgtttatttttttgttttttaaagattttttgtgttttagtttaggtatg

SEQ ID NO: 7099 - DNA, 120 bp, synthetic construct
  source 1..120: mol_type = other DNA
aaacactaataataaaaacaactcacccctaactaaaaaaaaaaaaaaataattccctaaacaaaacaataacattacctacttccctatcccccaaaaaccccctacaccccaactcaa

SEQ ID NO: 7100 - DNA, 120 bp, synthetic construct
  source 1..120: mol_type = other DNA
gaatattgatggtgagagtagtttatttttgattgaagggagagagaagtgattttttagatagagtagtggtattgtttatttttttgttttttaaagattttttgtgttttagtttag

SEQ ID NO: 7101 - DNA, 120 bp, synthetic construct
  source 1..120: mol_type = other DNA
aaaataaacactaataataaaaacaactcacccctaactaaaaaaaaaaaaaaataattcccaataacattacctacttccctatcccccaaaaaccccctacgccccaactcaaacata

SEQ ID NO: 7102 - DNA, 120 bp, synthetic construct
  source 1..120: mol_type = other DNA
agagtgaatattgatggtgagagtagtttatttttgattgaagggagagagaagtgatttttagtggtattgtttatttttttgttttttaaagattttttgcgttttagtttaggtatg

SEQ ID NO: 7103 - DNA, 120 bp, synthetic construct
  source 1..120: mol_type = other DNA
aaacactaataataaaaacaactcacccctaactaaaaaaaaaaaaaaataattccctaaacaaaacaataacattacctacttccctatcccccaaaaaccccctacgccccaactcaa

SEQ ID NO: 7104 - DNA, 120 bp, synthetic construct
  source 1..120: mol_type = other DNA
gaatattgatggtgagagtagtttatttttgattgaagggagagagaagtgattttttagatagagtagtggtattgtttatttttttgttttttaaagattttttgcgttttagtttag

SEQ ID NO: 7105 - DNA, 120 bp, synthetic construct
  source 1..120: mol_type = other DNA
caaaaacttcatcaataaaaaaataataaaaataaactaaatttcccctatttaataaataacaaaaatttaaaaaaaccaaaaccataaatataaattaacactaacattacttcaata

SEQ ID NO: 7106 - DNA, 120 bp, synthetic construct
  source 1..120: mol_type = other DNA
taggggttttattaataaaagagtaataaaagtgggttaaattttttttatttgataagtgataaaaatttgaggaaattaaggttataaatatggattgatattggtattgttttagtg

SEQ ID NO: 7107 - DNA, 120 bp, synthetic construct
  source 1..120: mol_type = other DNA
aaattcaaaaacttcatcaataaaaaaataataaaaataaactaaatttcccctatttaataatttaaaaaaaccaaaaccataaatataaattaacactaacattacttcaatactaaa

SEQ ID NO: 7108 - DNA, 120 bp, synthetic construct
  source 1..120: mol_type = other DNA
aaatttaggggttttattaataaaagagtaataaaagtgggttaaattttttttatttgataatttgaggaaattaaggttataaatatggattgatattggtattgttttagtgttgaa

SEQ ID NO: 7109 - DNA, 120 bp, synthetic construct; identical to SEQ ID NO: 7105
  source 1..120: mol_type = other DNA

SEQ ID NO: 7110 - DNA, 120 bp, synthetic construct; identical to SEQ ID NO: 7106
  source 1..120: mol_type = other DNA

SEQ ID NO: 7111 - DNA, 120 bp, synthetic construct; identical to SEQ ID NO: 7107
  source 1..120: mol_type = other DNA

SEQ ID NO: 7112 - DNA, 120 bp, synthetic construct; identical to SEQ ID NO: 7108
  source 1..120: mol_type = other DNA

SEQ ID NO: 7113 - DNA, 120 bp, synthetic construct
  source 1..120: mol_type = other DNA
ctcaaaaacactacctaaaaaccctaaaacctacaaaaaaaaaaaaaaaacaaaaactaataaaatacttacaaaaaccctaaactcctatcctaccataaacctcactatctcctaata

SEQ ID NO: 7114 - DNA, 120 bp, synthetic construct
  source 1..120: mol_type = other DNA
tttaggaatgttgtttgaggattttggggtttatgaggaggagaagagggtaggagttggtggggtgtttgtagagattttgggtttttattttgttataagttttgttgttttttgata

SEQ ID NO: 7115 - DNA, 120 bp, synthetic construct
  source 1..120: mol_type = other DNA
aaaactcaaaaacactacctaaaaaccctaaaacctacaaaaaaaaaaaaaaaacaaaaacacttacaaaaaccctaaactcctatcctaccataaacctcactatctcctaatatctac

SEQ ID NO: 7116 - DNA, 120 bp, synthetic construct
  source 1..120: mol_type = other DNA
agagtttaggaatgttgtttgaggattttggggtttatgaggaggagaagagggtaggagtgtttgtagagattttgggtttttattttgttataagttttgttgttttttgatatttgt

SEQ ID NO: 7117 - DNA, 120 bp, synthetic construct
  source 1..120: mol_type = other DNA
ctcaaaaacgctacctaaaaaccctaaaacctacgaaaaaaaaaaaaaaacaaaaactaataaaatacttacaaaaaccctaaactcctatcctaccataaacctcgctatctcctaata

SEQ ID NO: 7118 - DNA, 120 bp, synthetic construct
  source 1..120: mol_type = other DNA
tttaggaacgttgtttgaggattttggggtttacgaggaggagaagagggtaggagttggtggggtgtttgtagagattttgggtttttattttgttataagtttcgttgttttttgata

SEQ ID NO: 7119 - DNA, 120 bp, synthetic construct
  source 1..120: mol_type = other DNA
aaaactcaaaaacgctacctaaaaaccctaaaacctacgaaaaaaaaaaaaaaacaaaaacgcttacaaaaaccctaaactcctatcctaccataaacctcgctatctcctaatatctac

SEQ ID NO: 7120 - DNA, 120 bp, synthetic construct
  source 1..120: mol_type = other DNA
agagtttaggaacgttgtttgaggattttggggtttacgaggaggagaagagggtaggagcgtttgtagagattttgggtttttattttgttataagtttcgttgttttttgatatttgt

SEQ ID NO: 7121 - DNA, 120 bp, synthetic construct
  source 1..120: mol_type = other DNA
tttaaaaaatattctatactttatcaaatatttactatcctaacctctaccactaaatacccaaaacactcctcccccaccccccaaaaataacattcaaaaatatctacaaacattacc

SEQ ID NO: 7122 - DNA, 120 bp, synthetic construct
  source 1..120: mol_type = other DNA
tttaggaggtgttttgtattttgttggatgtttattattttgatttttattattaggtgtttgaagtattttttttttgttttttagaagtgatatttaaaaatgtttgtagatattgtt

SEQ ID NO: 7123 - DNA, 120 bp, synthetic construct
  source 1..120: mol_type = other DNA
tattttaaaaaatattctatactttatcaaatatttactatcctaacctctaccactaaatacactcctcccccaccccccaaaaataacattcaaaaatatctacaaacattaccaaat

SEQ ID NO: 7124 - DNA, 120 bp, synthetic construct
  source 1..120: mol_type = other DNA
tgttttaggaggtgttttgtattttgttggatgtttattattttgatttttattattaggtgtattttttttttgttttttagaagtgatatttaaaaatgtttgtagatattgttaaat

SEQ ID NO: 7125 - DNA, 120 bp, synthetic construct
  source 1..120: mol_type = other DNA
tttaaaaaatattctatactttatcgaatatttactatcctaacctctaccactaaatacccgaaacactcctcccccgccccccaaaaataacattcaaaaatatctacaaacattacc

SEQ ID NO: 7126 - DNA, 120 bp, synthetic construct
  source 1..120: mol_type = other DNA
tttaggaggtgttttgtattttgtcggatgtttattattttgatttttattattaggtgttcgaagtatttttttttcgttttttagaagtgatatttaaaaatgtttgtagatattgtt

SEQ ID NO: 7127 - DNA, 120 bp, synthetic construct
  source 1..120: mol_type = other DNA
tattttaaaaaatattctatactttatcgaatatttactatcctaacctctaccactaaatacactcctcccccgccccccaaaaataacattcaaaaatatctacaaacattaccaaat

SEQ ID NO: 7128 - DNA, 120 bp, synthetic construct
  source 1..120: mol_type = other DNA
tgttttaggaggtgttttgtattttgtcggatgtttattattttgatttttattattaggtgtatttttttttcgttttttagaagtgatatttaaaaatgtttgtagatattgttaaat

SEQ ID NO: 7129 - DNA, 120 bp, synthetic construct
  source 1..120: mol_type = other DNA
tctaaaaaataaatatttattaaatcccaaattttaaaactttaataaattaataacaacataacctttatacaaatcaaattacaaattaaaaattaattaaaaaaaaaataaaaaata

SEQ ID NO: 7130 - DNA, 120 bp, synthetic construct
  source 1..120: mol_type = other DNA
tttgagaaataggtgtttattaaattttagattttagaattttagtagattgataatagtatagtttttgtgtaagttaaattataagttaaaagttaattagaaaaaaaatagaaaata

SEQ ID NO: 7131 - DNA, 120 bp, synthetic construct
  source 1..120: mol_type = other DNA
caaaatctaaaaaataaatatttattaaatcccaaattttaaaactttaataaattaataatttatacaaatcaaattacaaattaaaaattaattaaaaaaaaaataaaaaataaaaaa

SEQ ID NO: 7132 - DNA, 120 bp, synthetic construct
  source 1..120: mol_type = other DNA
taaaatttgagaaataggtgtttattaaattttagattttagaattttagtagattgataatttgtgtaagttaaattataagttaaaagttaattagaaaaaaaatagaaaataaagga

SEQ ID NO: 7133 - DNA, 120 bp, synthetic construct; identical to SEQ ID NO: 7129
  source 1..120: mol_type = other DNA

SEQ ID NO: 7134 - DNA, 120 bp, synthetic construct; identical to SEQ ID NO: 7130
  source 1..120: mol_type = other DNA

SEQ ID NO: 7135 - DNA, 120 bp, synthetic construct; identical to SEQ ID NO: 7131
  source 1..120: mol_type = other DNA

SEQ ID NO: 7136 - DNA, 120 bp, synthetic construct; identical to SEQ ID NO: 7132
  source 1..120: mol_type = other DNA

SEQ ID NO: 7137 - DNA, 120 bp, synthetic construct
  source 1..120: mol_type = other DNA
acacattattctaaaacatacctaaaacccaataccttaatactacatttctaaaaaaactaaaaatacttttatcttaaacttttacaacaattacaatattaataactccaaaacttc

SEQ ID NO: 7138 - DNA, 120 bp, synthetic construct
  source 1..120: mol_type = other DNA
gtatattgttttaaagtatgtttggggtttgatgttttggtgttgtatttttgggggagttgggagtatttttgttttaggtttttgtagtagttatagtgttaatggttttaagatttt

SEQ ID NO: 7139 - DNA, 120 bp, synthetic construct
  source 1..120: mol_type = other DNA
ttattctaaaacatacctaaaacccaataccttaatactacatttctaaaaaaactaaaccttcccaaaaatacttttatcttaaacttttacaacaattacaatattaataactccaaa

SEQ ID NO: 7140 - DNA, 120 bp, synthetic construct
  source 1..120: mol_type = other DNA
ttgttttaaagtatgtttggggtttgatgttttggtgttgtatttttgggggagttgagtttttttgggagtatttttgttttaggtttttgtagtagttatagtgttaatggttttaag

SEQ ID NO: 7141 - DNA, 120 bp, synthetic construct
  source 1..120: mol_type = other DNA
acacattattctaaaacatacctaaaacccgataccttaatactacatttctaaaaaaactaaaaatacttttatcttaaacttttacaacaattacaatattaataactccaaaacttc

SEQ ID NO: 7142 - DNA, 120 bp, synthetic construct
  source 1..120: mol_type = other DNA
gtatattgttttaaagtatgtttggggttcgatgttttggtgttgtatttttgggggagttgggagtatttttgttttaggtttttgtagtagttatagtgttaatggttttaagatttt

SEQ ID NO: 7143 - DNA, 120 bp, synthetic construct
  source 1..120: mol_type = other DNA
ttattctaaaacatacctaaaacccgataccttaatactacatttctaaaaaaactaaaccttcccgaaaatacttttatcttaaacttttacaacaattacaatattaataactccaaa

SEQ ID NO: 7144 - DNA, 120 bp, synthetic construct
  source 1..120: mol_type = other DNA
ttgttttaaagtatgtttggggttcgatgttttggtgttgtatttttgggggagttgagttttttcgggagtatttttgttttaggtttttgtagtagttatagtgttaatggttttaag

SEQ ID NO: 7145 - DNA, 120 bp, synthetic construct
  source 1..120: mol_type = other DNA
aaataaccacaaaaaccatacctatttataccttttaaacaccacaacaaataataaaaatttacaaaacaaaaaaaaaaaaactaactccacaaacccaaacccctaaaaaccaaaaca

SEQ ID NO: 7146 - DNA, 120 bp, synthetic construct
  source 1..120: mol_type = other DNA
ggatggttgtagggattatatttgtttgtattttttgaatgttgtagtgggtggtgagggtttatggagtgggggaggggaagttgattttatgagtttagatttttgaaggttagagta

SEQ ID NO: 7147 - DNA, 120 bp, synthetic construct
  source 1..120: mol_type = other DNA
taaaaataaccacaaaaaccatacctatttataccttttaaacaccacaacaaataataaaaaaacaaaaaaaaaaaaactaactccacaaacccaaacccctaaaaaccaaaacaacaa

SEQ ID NO: 7148 - DNA, 120 bp, synthetic construct
  source 1..120: mol_type = other DNA
tggggatggttgtagggattatatttgtttgtattttttgaatgttgtagtgggtggtgagggagtgggggaggggaagttgattttatgagtttagatttttgaaggttagagtagtgg

SEQ ID NO: 7149 - DNA, 120 bp, synthetic construct
  source 1..120: mol_type = other DNA
aaataaccgcaaaaaccatacctatttataccttttaaacgccgcaacgaataataaaaatttacgaaacgaaaaaaaaaaaactaactccacgaacccaaacccctaaaaaccaaaaca

SEQ ID NO: 7150 - DNA, 120 bp, synthetic construct
  source 1..120: mol_type = other DNA
ggatggtcgtagggattatatttgtttgtattttttgaacgtcgtagcgggtggtgagggtttacggagcgggggaggggaagttgattttacgagtttagatttttgaaggttagagta

SEQ ID NO: 7151 - DNA, 120 bp, synthetic construct
  source 1..120: mol_type = other DNA
taaaaataaccgcaaaaaccatacctatttataccttttaaacgccgcaacgaataataaaaaaacgaaaaaaaaaaaactaactccacgaacccaaacccctaaaaaccaaaacaacga

SEQ ID NO: 7152 - DNA, 120 bp, synthetic construct
  source 1..120: mol_type = other DNA
tggggatggtcgtagggattatatttgtttgtattttttgaacgtcgtagcgggtggtgagggagcgggggaggggaagttgattttacgagtttagatttttgaaggttagagtagcgg

SEQ ID NO: 7153 - DNA, 120 bp, synthetic construct
  source 1..120: mol_type = other DNA
ataaaacaaaaaaaaaaaccacccacaaacacctcccaacttccccttcttcctacaaaaactacaaaacaacaaccaaaacaacaactaaaacaacaacaacaacttctcaaatcaacc

SEQ ID NO: 7154 - DNA, 120 bp, synthetic construct
  source 1..120: mol_type = other DNA
gtggggtaaagggagaggttatttatagatgttttttgatttttttttttttttgtagaagttataagatagtagttgagatagtagttgagatggtagtggtagttttttaggttagtt

SEQ ID NO: 7155 - DNA, 120 bp, synthetic construct
  source 1..120: mol_type = other DNA
aatataaaacaaaaaaaaaaaccacccacaaacacctcccaacttccccttcttcctacaaaaaacaacaaccaaaacaacaactaaaacaacaacaacaacttctcaaatcaacctcct

SEQ ID NO: 7156 - DNA, 120 bp, synthetic construct
  source 1..120: mol_type = other DNA
ggtgtggggtaaagggagaggttatttatagatgttttttgatttttttttttttttgtagaagatagtagttgagatagtagttgagatggtagtggtagttttttaggttagtttttt

SEQ ID NO: 7157 - DNA, 120 bp, synthetic construct
  source 1..120: mol_type = other DNA
ataaaacaaaaaaaaaaaccacccacaaacgcctcccgacttccccttcttcctacaaaaactacaaaacaacaaccgaaacaacaactaaaacgacaacgacaacttctcaaatcaacc

SEQ ID NO: 7158 - DNA, 120 bp, synthetic construct
  source 1..120: mol_type = other DNA
gtggggtaaagggagaggttatttatagacgtttttcgatttttttttttttttgtagaagttataagatagtagtcgagatagtagttgagacggtagcggtagttttttaggttagtt

SEQ ID NO: 7159 - DNA, 120 bp, synthetic construct
  source 1..120: mol_type = other DNA
aatataaaacaaaaaaaaaaaccacccacaaacgcctcccgacttccccttcttcctacaaaaaacaacaaccgaaacaacaactaaaacgacaacgacaacttctcaaatcaacctcct

SEQ ID NO: 7160 - DNA, 120 bp, synthetic construct
  source 1..120: mol_type = other DNA
ggtgtggggtaaagggagaggttatttatagacgtttttcgatttttttttttttttgtagaagatagtagtcgagatagtagttgagacggtagcggtagttttttaggttagtttttt

SEQ ID NO: 7161 - DNA, 120 bp, synthetic construct
  source 1..120: mol_type = other DNA
acacataaacatacctatcaaataataatcactacttccataattctttatcattttattttttatatataaataaataaaacaaataaacaaaaaaattttaaaaaatctactcttcta

SEQ ID NO: 7162 - DNA, 120 bp, synthetic construct
  source 1..120: mol_type = other DNA
atatatgagtatgtttattaaatagtggttattatttttatagttttttattattttattttttgtatataaatgaataaagtaaatgagtaaagaagttttaagagatttgtttttttg

SEQ ID NO: 7163 - DNA, 120 bp, synthetic construct
  source 1..120: mol_type = other DNA
taaacatacctatcaaataataatcactacttccataattctttatcattttattttttaattaaatttatatataaataaataaaacaaataaacaaaaaaattttaaaaaatctactc

SEQ ID NO: 7164 - DNA, 120 bp, synthetic construct
  source 1..120: mol_type = other DNA
tgagtatgtttattaaatagtggttattatttttatagttttttattattttattttttaattgagtttgtatataaatgaataaagtaaatgagtaaagaagttttaagagatttgttt

SEQ ID NO: 7165 - DNA, 120 bp, synthetic construct; identical to SEQ ID NO: 7161
  source 1..120: mol_type = other DNA

SEQ ID NO: 7166 - DNA, 120 bp, synthetic construct; identical to SEQ ID NO: 7162
  source 1..120: mol_type = other DNA

SEQ ID NO: 7167 - DNA, 120 bp, synthetic construct; identical to SEQ ID NO: 7163
  source 1..120: mol_type = other DNA

SEQ ID NO: 7168 - DNA, 120 bp, synthetic construct; identical to SEQ ID NO: 7164
  source 1..120: mol_type = other DNA

SEQ ID NO: 7169 - DNA, 120 bp, synthetic construct
  source 1..120: mol_type = other DNA
aaaaaatataaaataaaaaacaaactattttaataaactctctttaatcctctaaaaaactataataaataatttttattaaaattttaaataatactaatatcatctaaaacatctact

SEQ ID NO: 7170 - DNA, 120 bp, synthetic construct
  source 1..120: mol_type = other DNA
gggaaatgtggaatgaagaataaattgttttggtaaattttttttaattttttaaaagattataatgagtgatttttgttagaattttagatgatgttgatgttatttgaaatatttatt

SEQ ID NO: 7171 - DNA, 120 bp, synthetic construct
  source 1..120: mol_type = other DNA
ccaaaaaaaatataaaataaaaaacaaactattttaataaactctctttaatcctctaaaaaaataatttttattaaaattttaaataatactaatatcatctaaaacatctacttaaat

SEQ ID NO: 7172 - DNA, 120 bp, synthetic construct
  source 1..120: mol_type = other DNA
ttaagggaaatgtggaatgaagaataaattgttttggtaaattttttttaattttttaaaagagtgatttttgttagaattttagatgatgttgatgttatttgaaatatttatttaggt

SEQ ID NO: 7173 - DNA, 120 bp, synthetic construct; identical to SEQ ID NO: 7169
  source 1..120: mol_type = other DNA

SEQ ID NO: 7174 - DNA, 120 bp, synthetic construct; identical to SEQ ID NO: 7170
  source 1..120: mol_type = other DNA

SEQ ID NO: 7175 - DNA, 120 bp, synthetic construct; identical to SEQ ID NO: 7171
  source 1..120: mol_type = other DNA

SEQ ID NO: 7176 - DNA, 120 bp, synthetic construct; identical to SEQ ID NO: 7172
  source 1..120: mol_type = other DNA

SEQ ID NO: 7177 - DNA, 120 bp, synthetic construct
  source 1..120: mol_type = other DNA
aacaaaacatttttttctcccaaaacctctcattccccactctaaaaatcaaaaatacttttaaacctaaataattactaaaaccttatctacatatataattatttaacctcacaatcc

SEQ ID NO: 7178 - DNA, 120 bp, synthetic construct
  source 1..120: mol_type = other DNA
gataagatattttttttttttggagttttttattttttattttaaaagttagaaatgtttttagatttgggtagttattgaggttttgtttatatgtataattatttggttttatagttt

SEQ ID NO: 7179 - DNA, 120 bp, synthetic construct
  source 1..120: mol_type = other DNA
ataaacaaaacatttttttctcccaaaacctctcattccccactctaaaaatcaaaaatacacctaaataattactaaaaccttatctacatatataattatttaacctcacaatccaaa

SEQ ID NO: 7180 - DNA, 120 bp, synthetic construct
  source 1..120: mol_type = other DNA
atggataagatattttttttttttggagttttttattttttattttaaaagttagaaatgtatttgggtagttattgaggttttgtttatatgtataattatttggttttatagtttaga

SEQ ID NO: 7181 - DNA, 120 bp, synthetic construct
  source 1..120: mol_type = other DNA
aacaaaacatttttttctcccgaaacctctcattccccactctaaaaatcaaaaatacttttaaacctaaataattactaaaaccttatctacatatataattatttaacctcacaatcc

SEQ ID NO: 7182 - DNA, 120 bp, synthetic construct
  source 1..120: mol_type = other DNA
gataagatatttttttttttcggagttttttattttttattttaaaagttagaaatgtttttagatttgggtagttattgaggttttgtttatatgtataattatttggttttatagttt

SEQ ID NO: 7183 - DNA, 120 bp, synthetic construct
  source 1..120: mol_type = other DNA
ataaacaaaacatttttttctcccgaaacctctcattccccactctaaaaatcaaaaatacacctaaataattactaaaaccttatctacatatataattatttaacctcacaatccaaa

SEQ ID NO: 7184 - DNA, 120 bp, synthetic construct
  source 1..120: mol_type = other DNA
atggataagatatttttttttttcggagttttttattttttattttaaaagttagaaatgtatttgggtagttattgaggttttgtttatatgtataattatttggttttatagtttaga

SEQ ID NO: 7185 - DNA, 120 bp, synthetic construct
  source 1..120: mol_type = other DNA
atctaaaaattttttaaaacttctctaaccaaataataatattttcttactataaaaaaaatttatatatttcaaatttttcatctttccttataacatttaataaaaaaaattcaaata

SEQ ID NO: 7186 - DNA, 120 bp, synthetic construct
  source 1..120: mol_type = other DNA
atttaaaaattttttagagtttttttggttagatgatggtatttttttgttataaaaaaaatttatgtgttttaggttttttatttttttttatggtgtttaatgaaaaaagtttaaata

SEQ ID NO: 7187 - DNA, 120 bp, synthetic construct
  source 1..120: mol_type = other DNA
aaaattttttaaaacttctctaaccaaataataatattttcttactataaaaaaaattaatatactttatatatttcaaatttttcatctttccttataacatttaataaaaaaaattca

SEQ ID NO: 7188 - DNA, 120 bp, synthetic construct
  source 1..120: mol_type = other DNA
aaaattttttagagtttttttggttagatgatggtatttttttgttataaaaaaaattaatgtattttatgtgttttaggttttttatttttttttatggtgtttaatgaaaaaagttta

SEQ ID NO: 7189 - DNA, 120 bp, synthetic construct
  source 1..120: mol_type = other DNA
atctaaaaattttttaaaacttctctaaccaaataataatattttcttactataaaaaaaatttatatatttcaaatttttcatctttccttataacgtttaataaaaaaaattcaaata

SEQ ID NO: 7190 - DNA, 120 bp, synthetic construct
  source 1..120: mol_type = other DNA
atttaaaaattttttagagtttttttggttagatgatggtatttttttgttataaaaaaaatttatgtgttttaggttttttatttttttttatggcgtttaatgaaaaaagtttaaata

SEQ ID NO: 7191 - DNA, 120 bp, synthetic construct
  source 1..120: mol_type = other DNA
aaaattttttaaaacttctctaaccaaataataatattttcttactataaaaaaaattaatatactttatatatttcaaatttttcatctttccttataacgtttaataaaaaaaattca

SEQ ID NO: 7192 - DNA, 120 bp, synthetic construct
  source 1..120: mol_type = other DNA
aaaattttttagagtttttttggttagatgatggtatttttttgttataaaaaaaattaatgtattttatgtgttttaggttttttatttttttttatggcgtttaatgaaaaaagttta

SEQ ID NO: 7193 - DNA, 120 bp, synthetic construct
  source 1..120: mol_type = other DNA
ctaaaacaatcctttctaacttcaaatctataccattatttcttaaaaaactttctctaactaaaacacaaatcttaaacaaaaaaaatttttttttttctttttttaaattttattatt

SEQ ID NO: 7194 - DNA, 120 bp, synthetic construct
  source 1..120: mol_type = other DNA
ttaggatagttttttttaattttagatttatattattattttttaagaaattttttttaattaaggtatagattttaagtaaaaaaagtttttttttttttttttttaaattttattatt

SEQ ID NO: 7195 - DNA, 120 bp, synthetic construct
  source 1..120: mol_type = other DNA
acaatcctttctaacttcaaatctataccattatttcttaaaaaactttctctaactactaattttaaaacacaaatcttaaacaaaaaaaatttttttttttctttttttaaattttat

SEQ ID NO: 7196 - DNA, 120 bp, synthetic construct
  source 1..120: mol_type = other DNA
atagttttttttaattttagatttatattattattttttaagaaattttttttaattattaattttaaggtatagattttaagtaaaaaaagtttttttttttttttttttaaattttat

SEQ ID NO: 7197 - DNA, 120 bp, synthetic construct; identical to SEQ ID NO: 7193
  source 1..120: mol_type = other DNA

SEQ ID NO: 7198 - DNA, 120 bp, synthetic construct; identical to SEQ ID NO: 7194
  source 1..120: mol_type = other DNA

SEQ ID NO: 7199 - DNA, 120 bp, synthetic construct; identical to SEQ ID NO: 7195
  source 1..120: mol_type = other DNA

SEQ ID NO: 7200 - DNA, 120 bp, synthetic construct; identical to SEQ ID NO: 7196
  source 1..120: mol_type = other DNA

SEQ ID NO: 7201 - DNA, 120 bp, synthetic construct
  source 1..120: mol_type = other DNA
ctacataaaaacaaaatttactaaatttaaaaacacttaaatattttaataaacctcacaaaaaattttttttttaataaataaaatcaccaaatacatttatacttttattaaaattaa

SEQ ID NO: 7202 - DNA, 120 bp, synthetic construct
  source 1..120: mol_type = other DNA
ttgtatgggggtagaatttgttggatttagaggtatttgaatattttgataagttttatagagaattttttttttaatgagtgaaattattaaatgtatttgtatttttgttaaaattaa

SEQ ID NO: 7203 - DNA, 120 bp, synthetic construct
  source 1..120: mol_type = other DNA
tatcctacataaaaacaaaatttactaaatttaaaaacacttaaatattttaataaacctctttttttttaataaataaaatcaccaaatacatttatacttttattaaaattaaaatta

SEQ ID NO: 7204 - DNA, 120 bp, synthetic construct
  source 1..120: mol_type = other DNA
tgttttgtatgggggtagaatttgttggatttagaggtatttgaatattttgataagtttttttttttttaatgagtgaaattattaaatgtatttgtatttttgttaaaattaaagttg

SEQ ID NO: 7205 - DNA, 120 bp, synthetic construct; identical to SEQ ID NO: 7201
  source 1..120: mol_type = other DNA

SEQ ID NO: 7206 - DNA, 120 bp, synthetic construct; identical to SEQ ID NO: 7202
  source 1..120: mol_type = other DNA

SEQ ID NO: 7207 - DNA, 120 bp, synthetic construct; identical to SEQ ID NO: 7203
  source 1..120: mol_type = other DNA

SEQ ID NO: 7208 - DNA, 120 bp, synthetic construct; identical to SEQ ID NO: 7204
  source 1..120: mol_type = other DNA

SEQ ID NO: 7209 - DNA, 120 bp, synthetic construct
  source 1..120: mol_type = other DNA
aaacaactataacctccatcacataaaaaaaaaacttcacttaaaaacccatatatctataactaacttcaaaacacaacaatacaaacttacccaacatcccacaattctcctaataaa

SEQ ID NO: 7210 - DNA, 120 bp, synthetic construct
  source 1..120: mol_type = other DNA
gggtgattgtgatttttattatatggggagggagttttgtttggaaatttatgtgtttgtggttgattttagagtgtagtagtgtagatttgtttggtattttatggtttttttagtggg

SEQ ID NO: 7211 - DNA, 120 bp, synthetic construct
  source 1..120: mol_type = other DNA
aaaaaaaacaactataacctccatcacataaaaaaaaaacttcacttaaaaacccatatatcttcaaaacacaacaatacaaacttacccaacatcccacaattctcctaataaactcct

SEQ ID NO: 7212 - DNA, 120 bp, synthetic construct
  source 1..120: mol_type = other DNA
agggagggtgattgtgatttttattatatggggagggagttttgtttggaaatttatgtgtttttagagtgtagtagtgtagatttgtttggtattttatggtttttttagtgggttttt

SEQ ID NO: 7213 - DNA, 120 bp, synthetic construct
  source 1..120: mol_type = other DNA
aaacgactataacctccatcacataaaaaaaaaacttcgcttaaaaacccatatatctataactaacttcaaaacgcaacaatacaaacttacccgacatcccacgattctcctaataaa

SEQ ID NO: 7214 - DNA, 120 bp, synthetic construct
  source 1..120: mol_type = other DNA
gggcgattgtgatttttattatatggggagggagtttcgtttggaaatttatgtgtttgtggttgattttagagcgtagtagtgtagatttgttcggtattttacggtttttttagtggg

SEQ ID NO: 7215 - DNA, 120 bp, synthetic construct
  source 1..120: mol_type = other DNA
aaaaaaaacgactataacctccatcacataaaaaaaaaacttcgcttaaaaacccatatatcttcaaaacgcaacaatacaaacttacccgacatcccacgattctcctaataaactcct

SEQ ID NO: 7216 - DNA, 120 bp, synthetic construct
  source 1..120: mol_type = other DNA
agggagggcgattgtgatttttattatatggggagggagtttcgtttggaaatttatgtgtttttagagcgtagtagtgtagatttgttcggtattttacggtttttttagtgggttttt

SEQ ID NO: 7217 - DNA, 120 bp, synthetic construct
  source 1..120: mol_type = other DNA
tttcctacataccattaccttacccccaaaacactaaaaaaatatactattttctccattttctataaaaaacaatcaataaaacataaaaaaccaacaaaaattaaaaaaaaccaataa

SEQ ID NO: 7218 - DNA, 120 bp, synthetic construct
  source 1..120: mol_type = other DNA
ttttttatatgttattgttttgtttttagggtattgaaaagatgtgttattttttttattttttgtgaaaagtagttagtgaggtatgagagattagtaagggttaaagagggttagtgg

SEQ ID NO: 7219 - DNA, 120 bp, synthetic construct
  source 1..120: mol_type = other DNA
tacataccattaccttacccccaaaacactaaaaaaatatactattttctccattttcatcctatatctataaaaaacaatcaataaaacataaaaaaccaacaaaaattaaaaaaaacc

SEQ ID NO: 7220 - DNA, 120 bp, synthetic construct
  source 1..120: mol_type = other DNA
tatatgttattgttttgtttttagggtattgaaaagatgtgttattttttttatttttgttttgtgtttgtgaaaagtagttagtgaggtatgagagattagtaagggttaaagagggtt

SEQ ID NO: 7221 - DNA, 120 bp, synthetic construct; identical to SEQ ID NO: 7217
  source 1..120: mol_type = other DNA

SEQ ID NO: 7222 - DNA, 120 bp, synthetic construct; identical to SEQ ID NO: 7218
  source 1..120: mol_type = other DNA

SEQ ID NO: 7223 - DNA, 120 bp, synthetic construct
  source 1..120: mol_type = other DNA
tacataccattaccttacccccaaaacactaaaaaaatatactattttctccattttcgtcctatatctataaaaaacaatcaataaaacataaaaaaccaacaaaaattaaaaaaaacc

SEQ ID NO: 7224 - DNA, 120 bp, synthetic construct
  source 1..120: mol_type = other DNA
tatatgttattgttttgtttttagggtattgaaaagatgtgttattttttttattttcgttttgtgtttgtgaaaagtagttagtgaggtatgagagattagtaagggttaaagagggtt

SEQ ID NO: 7225 - DNA, 120 bp, synthetic construct
  source 1..120: mol_type = other DNA
tatattaactataatactattaaacataatttcaaacatacatcataataattctttacaaccctatataaaaaaaccaaaaataataatcaaaacctaacaaaaatcttatttacctaa

SEQ ID NO: 7226 - DNA, 120 bp, synthetic construct
  source 1..120: mol_type = other DNA
tatattgattgtaatattgttaaatataattttaaatatatattatgatgattttttataattttgtataggaaggttaagggtagtagttaaagtttggtaggaattttgtttatttaa

SEQ ID NO: 7227 - DNA, 120 bp, synthetic construct
  source 1..120: mol_type = other DNA
taatctatattaactataatactattaaacataatttcaaacatacatcataataattctttataaaaaaaccaaaaataataatcaaaacctaacaaaaatcttatttacctaaaaata

SEQ ID NO: 7228 - DNA, 120 bp, synthetic construct
  source 1..120: mol_type = other DNA
tagtttatattgattgtaatattgttaaatataattttaaatatatattatgatgattttttataggaaggttaagggtagtagttaaagtttggtaggaattttgtttatttaaagata

SEQ ID NO: 7229 - DNA, 120 bp, synthetic construct; identical to SEQ ID NO: 7225
  source 1..120: mol_type = other DNA

SEQ ID NO: 7230 - DNA, 120 bp, synthetic construct; identical to SEQ ID NO: 7226
  source 1..120: mol_type = other DNA

SEQ ID NO: 7231 - DNA, 120 bp, synthetic construct; identical to SEQ ID NO: 7227
  source 1..120: mol_type = other DNA

SEQ ID NO: 7232 - DNA, 120 bp, synthetic construct; identical to SEQ ID NO: 7228
  source 1..120: mol_type = other DNA

SEQ ID NO: 7233 - DNA, 120 bp, synthetic construct
  source 1..120: mol_type = other DNA
ttttatattttacaaaaaactttcactctactatcttactcaacacccacaataaaactatcaaattaaaaaaaccacatttttaccctcattttaaacataaaaaaactaaaaaaccaa

SEQ ID NO: 7234 - DNA, 120 bp, synthetic construct
  source 1..120: mol_type = other DNA
ttttatattttataaagggtttttgttttgttattttatttagtgtttataataaggttattgggttggaagggttatatttttatttttattttagatatgaggaaattagggggttag

SEQ ID NO: 7235 - DNA, 120 bp, synthetic construct
  source 1..120: mol_type = other DNA
cttttttatattttacaaaaaactttcactctactatcttactcaacacccacaataaaacttaaaaaaaccacatttttaccctcattttaaacataaaaaaactaaaaaaccaattac

SEQ ID NO: 7236 - DNA, 120 bp, synthetic construct
  source 1..120: mol_type = other DNA
tttttttatattttataaagggtttttgttttgttattttatttagtgtttataataaggtttggaagggttatatttttatttttattttagatatgaggaaattagggggttagttgt

SEQ ID NO: 7237 - DNA, 120 bp, synthetic construct
  source 1..120: mol_type = other DNA
ttttatattttacaaaaaactttcgctctactatcttactcaacgcccacaataaaactatcgaattaaaaaaaccacatttttaccctcattttaaacataaaaaaactaaaaaaccaa

SEQ ID NO: 7238 - DNA, 120 bp, synthetic construct
  source 1..120: mol_type = other DNA
ttttatattttataaagggttttcgttttgttattttatttagcgtttataataaggttatcgggttggaagggttatatttttatttttattttagatatgaggaaattagggggttag

SEQ ID NO: 7239 - DNA, 120 bp, synthetic construct
  source 1..120: mol_type = other DNA
cttttttatattttacaaaaaactttcgctctactatcttactcaacgcccacaataaaacttaaaaaaaccacatttttaccctcattttaaacataaaaaaactaaaaaaccaattac

SEQ ID NO: 7240 - DNA, 120 bp, synthetic construct
  source 1..120: mol_type = other DNA
tttttttatattttataaagggttttcgttttgttattttatttagcgtttataataaggtttggaagggttatatttttatttttattttagatatgaggaaattagggggttagttgt

SEQ ID NO: 7241 - DNA, 120 bp, synthetic construct
  source 1..120: mol_type = other DNA
aaaccaaaatttaaaaacaaaactttctccaaatcactctacttaatccttctctccaaacccaaatatcctccatacacctaaaaaactacacaaatcattcaaaattacaataaatac

SEQ ID NO: 7242 - DNA, 120 bp, synthetic construct
  source 1..120: mol_type = other DNA
gagttaagatttgaaggtagagttttttttaagttattttatttagtttttttttttaggtttaggtgttttttatgtatttgggaagttgtataggttatttaaggttgtagtggatgt

SEQ ID NO: 7243 - DNA, 120 bp, synthetic construct
  source 1..120: mol_type = other DNA
aaaatttaaaaacaaaactttctccaaatcactctacttaatccttctctccaaaccctaaacatccaaatatcctccatacacctaaaaaactacacaaatcattcaaaattacaataa

SEQ ID NO: 7244 - DNA, 120 bp, synthetic construct
  source 1..120: mol_type = other DNA
aagatttgaaggtagagttttttttaagttattttatttagtttttttttttaggttttgagtatttaggtgttttttatgtatttgggaagttgtataggttatttaaggttgtagtgg

SEQ ID NO: 7245 - DNA, 120 bp, synthetic construct; identical to SEQ ID NO: 7241
  source 1..120: mol_type = other DNA

SEQ ID NO: 7246 - DNA, 120 bp, synthetic construct; identical to SEQ ID NO: 7242
  source 1..120: mol_type = other DNA

SEQ ID NO: 7247 - DNA, 120 bp, synthetic construct; identical to SEQ ID NO: 7243
  source 1..120: mol_type = other DNA

SEQ ID NO: 7248 - DNA, 120 bp, synthetic construct; identical to SEQ ID NO: 7244
  source 1..120: mol_type = other DNA

SEQ ID NO: 7249 - DNA, 120 bp, synthetic construct
  source 1..120: mol_type = other DNA
aaaaaaccaaaaaactaatcccaaacccaaccaaaataaattattcttaaaaatccaaaaataataaaacacataaaaaattcctaataaaaaacataataaaatatccaaaattattac

SEQ ID NO: 7250 - DNA, 120 bp, synthetic construct
  source 1..120: mol_type = other DNA
gaaaggttagagaattggttttaggtttagttaagatgagttatttttggagatttaaggatgatgaagtatatgggaaatttttggtgaaaggtatggtgggatatttaagattattat

SEQ ID NO: 7251 - DNA, 120 bp, synthetic construct
  source 1..120: mol_type = other DNA
ctctaaaaaaaccaaaaaactaatcccaaacccaaccaaaataaattattcttaaaaatccaaacacataaaaaattcctaataaaaaacataataaaatatccaaaattattactaaaa

SEQ ID NO: 7252 - DNA, 120 bp, synthetic construct
  source 1..120: mol_type = other DNA
ttttagaaaggttagagaattggttttaggtttagttaagatgagttatttttggagatttaagtatatgggaaatttttggtgaaaggtatggtgggatatttaagattattattgaaa

SEQ ID NO: 7253 - DNA, 120 bp, synthetic construct; identical to SEQ ID NO: 7249
  source 1..120: mol_type = other DNA

SEQ ID NO: 7254 - DNA, 120 bp, synthetic construct; identical to SEQ ID NO: 7250
  source 1..120: mol_type = other DNA

SEQ ID NO: 7255 - DNA, 120 bp, synthetic construct; identical to SEQ ID NO: 7251
  source 1..120: mol_type = other DNA

SEQ ID NO: 7256 - DNA, 120 bp, synthetic construct; identical to SEQ ID NO: 7252
  source 1..120: mol_type = other DNA

SEQ ID NO: 7257 - DNA, 120 bp, synthetic construct
  source 1..120: mol_type = other DNA
caatttaactctatacacttattcatcatactttacactcctaaatactaacctatacaaaaaaatactctacctctaacttttatttaaattaaattctaccaatataaaatactaaaa

SEQ ID NO: 7258 - DNA, 120 bp, synthetic construct
  source 1..120: mol_type = other DNA
tagtttggttttatatatttgtttattgtgttttgtgtttttagatgttgatttgtatagagggatgttttgtttttggtttttgtttgggttgggttttgttaatgtgaagtgttggga

SEQ ID NO: 7259 - DNA, 120 bp, synthetic construct
  source 1..120: mol_type = other DNA
taactctatacacttattcatcatactttacactcctaaatactaacctatacaaaatacctcacaaaatactctacctctaacttttatttaaattaaattctaccaatataaaatact

SEQ ID NO: 7260 - DNA, 120 bp, synthetic construct
  source 1..120: mol_type = other DNA
tggttttatatatttgtttattgtgttttgtgtttttagatgttgatttgtatagaatgttttatgggatgttttgtttttggtttttgtttgggttgggttttgttaatgtgaagtgtt

SEQ ID NO: 7261 - DNA, 120 bp, synthetic construct
  source 1..120: mol_type = other DNA
caatttaactctatacacttattcatcgtactttacgctcctaaatactaacctatacaaaaaaatactctacctctaacttttatttaaattaaattctaccaatataaaatactaaaa

SEQ ID NO: 7262 - DNA, 120 bp, synthetic construct
  source 1..120: mol_type = other DNA
tagtttggttttatatatttgtttatcgtgttttgcgtttttagatgttgatttgtatagagggatgttttgtttttggtttttgtttgggttgggttttgttaatgtgaagtgttggga

SEQ ID NO: 7263 - DNA, 120 bp, synthetic construct
  source 1..120: mol_type = other DNA
taactctatacacttattcatcgtactttacgctcctaaatactaacctatacaaaatacctcacgaaatactctacctctaacttttatttaaattaaattctaccaatataaaatact

SEQ ID NO: 7264 - DNA, 120 bp, synthetic construct
  source 1..120: mol_type = other DNA
tggttttatatatttgtttatcgtgttttgcgtttttagatgttgatttgtatagaatgttttacgggatgttttgtttttggtttttgtttgggttgggttttgttaatgtgaagtgtt

SEQ ID NO: 7265 - DNA, 120 bp, synthetic construct
  source 1..120: mol_type = other DNA
aatataataacaaaaaacattttactacttcattcataaacaaaactaacatttatatttccctccccaaacacaataacaaaaaatacaataaccataaaaatatattacctctaccat

SEQ ID NO: 7266 - DNA, 120 bp, synthetic construct
  source 1..120: mol_type = other DNA
gatgtaatgatagggagtattttgttgttttatttatgagtgaaattggtatttgtgtttttttttttaagtatagtggtgaagaatataatggttataggggtgtgttgtttttgttat

SEQ ID NO: 7267 - DNA, 120 bp, synthetic construct
  source 1..120: mol_type = other DNA
ctaaaatataataacaaaaaacattttactacttcattcataaacaaaactaacatttataccaaacacaataacaaaaaatacaataaccataaaaatatattacctctaccattctct

SEQ ID NO: 7268 - DNA, 120 bp, synthetic construct
  source 1..120: mol_type = other DNA
ttgagatgtaatgatagggagtattttgttgttttatttatgagtgaaattggtatttgtgttaagtatagtggtgaagaatataatggttataggggtgtgttgtttttgttatttttt

SEQ ID NO: 7269 - DNA, 120 bp, synthetic construct
  source 1..120: mol_type = other DNA
aatataataacaaaaaacattttactacttcattcataaacgaaactaacatttatatttccctccccaaacacaataacgaaaaatacaataaccataaaaatatattacctctaccat

SEQ ID NO: 7270 - DNA, 120 bp, synthetic construct
  source 1..120: mol_type = other DNA
gatgtaatgatagggagtattttgttgttttatttatgagcgaaattggtatttgtgtttttttttttaagtatagtggcgaagaatataatggttataggggtgtgttgtttttgttat

SEQ ID NO: 7271 - DNA, 120 bp, synthetic construct
  source 1..120: mol_type = other DNA
ctaaaatataataacaaaaaacattttactacttcattcataaacgaaactaacatttataccaaacacaataacgaaaaatacaataaccataaaaatatattacctctaccattctct

SEQ ID NO: 7272 - DNA, 120 bp, synthetic construct
  source 1..120: mol_type = other DNA
ttgagatgtaatgatagggagtattttgttgttttatttatgagcgaaattggtatttgtgttaagtatagtggcgaagaatataatggttataggggtgtgttgtttttgttatttttt

SEQ ID NO: 7273 - DNA, 120 bp, synthetic construct
  source 1..120: mol_type = other DNA
acttcatacctcccttaaaattatattcaaaatctatactataatccataatattctacataattttacttacttattatatttaatctctactataaccacaattcctcaaacaatttt

SEQ ID NO: 7274 - DNA, 120 bp, synthetic construct
  source 1..120: mol_type = other DNA
gttttatattttttttaggattgtgtttagaatttgtattatgatttataatattttgtatgattttgtttatttgttatgtttagtttttgttatagttataattttttaggtagtttt

SEQ ID NO: 7275 - DNA, 120 bp, synthetic construct
  source 1..120: mol_type = other DNA
attctacttcatacctcccttaaaattatattcaaaatctatactataatccataatattctacttacttattatatttaatctctactataaccacaattcctcaaacaattttaactc

SEQ ID NO: 7276 - DNA, 120 bp, synthetic construct
  source 1..120: mol_type = other DNA
gttttgttttatattttttttaggattgtgtttagaatttgtattatgatttataatattttgtttatttgttatgtttagtttttgttatagttataattttttaggtagttttagttt

SEQ ID NO: 7277 - DNA, 120 bp, synthetic construct; identical to SEQ ID NO: 7273
  source 1..120: mol_type = other DNA

SEQ ID NO: 7278 - DNA, 120 bp, synthetic construct; identical to SEQ ID NO: 7274
  source 1..120: mol_type = other DNA

SEQ ID NO: 7279 - DNA, 120 bp, synthetic construct; identical to SEQ ID NO: 7275
  source 1..120: mol_type = other DNA

SEQ ID NO: 7280 - DNA, 120 bp, synthetic construct; identical to SEQ ID NO: 7276
  source 1..120: mol_type = other DNA

SEQ ID NO: 7281 - DNA, 120 bp, synthetic construct
  source 1..120: mol_type = other DNA
caaaaaaacatcttccctaaaaaaacataaaaaaaattctaaaaaactaacacaaaccactaaattccaaaaaaccaaactaacatcaatcatttaaaaatacaaaaatactataattac

SEQ ID NO: 7282 - DNA, 120 bp, synthetic construct
  source 1..120: mol_type = other DNA
tagagaaatattttttttaggggagtataaggaaggttttggaaagttggtatagattattgggttttagagggttaagttgatattagttgtttagggatgtaggaatgttgtggttgt

SEQ ID NO: 7283 - DNA, 120 bp, synthetic construct
  source 1..120: mol_type = other DNA
acaacaaaaaaacatcttccctaaaaaaacataaaaaaaattctaaaaaactaacacaaacccaaaaaaccaaactaacatcaatcatttaaaaatacaaaaatactataattaccacta

SEQ ID NO: 7284 - DNA, 120 bp, synthetic construct
  source 1..120: mol_type = other DNA
gtaatagagaaatattttttttaggggagtataaggaaggttttggaaagttggtatagatttagagggttaagttgatattagttgtttagggatgtaggaatgttgtggttgttattg

SEQ ID NO: 7285 - DNA, 120 bp, synthetic construct
  source 1..120: mol_type = other DNA
caaaaaaacatcttccctaaaaaaacataaaaaaaattctaaaaaactaacacaaaccactaaattccaaaaaaccaaactaacatcaatcgtttaaaaatacaaaaatactataattac

SEQ ID NO: 7286 - DNA, 120 bp, synthetic construct
  source 1..120: mol_type = other DNA
tagagaaatattttttttaggggagtataaggaaggttttggaaagttggtatagattattgggttttagagggttaagttgatattagtcgtttagggatgtaggaatgttgtggttgt

SEQ ID NO: 7287 - DNA, 120 bp, synthetic construct
  source 1..120: mol_type = other DNA
acaacaaaaaaacatcttccctaaaaaaacataaaaaaaattctaaaaaactaacacaaacccaaaaaaccaaactaacatcaatcgtttaaaaatacaaaaatactataattaccacta

SEQ ID NO: 7288 - DNA, 120 bp, synthetic construct
  source 1..120: mol_type = other DNA
gtaatagagaaatattttttttaggggagtataaggaaggttttggaaagttggtatagatttagagggttaagttgatattagtcgtttagggatgtaggaatgttgtggttgttattg

SEQ ID NO: 7289 - DNA, 120 bp, synthetic construct
  source 1..120: mol_type = other DNA
aaactaaaaaaacctaaaaccctcataatatcacaaacccatctaactaaacatcccctacactacacataccccaaataacccccacaacaaaaacaaaccactaaaaaataaaaaact

SEQ ID NO: 7290 - DNA, 120 bp, synthetic construct
  source 1..120: mol_type = other DNA
gggttggaggaatttgaagtttttgtgatgttataagtttatttggttgggtattttttgtgttgtatatgttttaggtggtttttatagtagaggtgagttattggagggtggagggtt

SEQ ID NO: 7291 - DNA, 120 bp, synthetic construct
  source 1..120: mol_type = other DNA
aaaaaaacctaaaaccctcataatatcacaaacccatctaactaaacatcccctactatatcctaaactacacataccccaaataacccccacaacaaaaacaaaccactaaaaaataaa

SEQ ID NO: 7292 - DNA, 120 bp, synthetic construct
  source 1..120: mol_type = other DNA
ggaggaatttgaagtttttgtgatgttataagtttatttggttgggtattttttgttgtgttttgagttgtatatgttttaggtggtttttatagtagaggtgagttattggagggtgga

SEQ ID NO: 7293 - DNA, 120 bp, synthetic construct
  source 1..120: mol_type = other DNA
aaactaaaaaaacctaaaaccctcgtaatatcacaaacccatctaactaaacatcccctacgctacacataccccaaataacccccacaacaaaaacgaaccactaaaaaataaaaaact

SEQ ID NO: 7294 - DNA, 120 bp, synthetic construct
  source 1..120: mol_type = other DNA
gggttggaggaatttgaagttttcgtgatgttataagtttatttggttgggtattttttgcgttgtatatgttttaggtggtttttatagtagaggcgagttattggagggtggagggtt

SEQ ID NO: 7295 - DNA, 120 bp, synthetic construct
  source 1..120: mol_type = other DNA
aaaaaaacctaaaaccctcgtaatatcacaaacccatctaactaaacatcccctactatatcctaaactacacataccccaaataacccccacaacaaaaacgaaccactaaaaaataaa

SEQ ID NO: 7296 - DNA, 120 bp, synthetic construct
  source 1..120: mol_type = other DNA
ggaggaatttgaagttttcgtgatgttataagtttatttggttgggtattttttgttgtgttttgagttgtatatgttttaggtggtttttatagtagaggcgagttattggagggtgga

SEQ ID NO: 7297 - DNA, 120 bp, synthetic construct
  source 1..120: mol_type = other DNA
tttatataattatttttcttttaacttacttatacataatttttcaaacaaattttatttcacctttactttttaccataaatttaaatctttatatattaaacttactaataattttaa

SEQ ID NO: 7298 - DNA, 120 bp, synthetic construct
  source 1..120: mol_type = other DNA
tttatatggttattttttttttaatttgtttgtatatggttttttaggtaagttttattttatttttgttttttgttatgaatttgaatttttatatattaaatttattgatggttttaa

SEQ ID NO: 7299 - DNA, 120 bp, synthetic construct
  source 1..120: mol_type = other DNA
tatttttatataattatttttcttttaacttacttatacataatttttcaaacaaattttattactttttaccataaatttaaatctttatatattaaacttactaataattttaataat

SEQ ID NO: 7300 - DNA, 120 bp, synthetic construct
  source 1..120: mol_type = other DNA
tgtttttatatggttattttttttttaatttgtttgtatatggttttttaggtaagttttattgttttttgttatgaatttgaatttttatatattaaatttattgatggttttaatagt

SEQ ID NO: 7301 - DNA, 120 bp, synthetic construct; identical to SEQ ID NO: 7297
  source 1..120: mol_type = other DNA

SEQ ID NO: 7302 - DNA, 120 bp, synthetic construct; identical to SEQ ID NO: 7298
  source 1..120: mol_type = other DNA

SEQ ID NO: 7303 - DNA, 120 bp, synthetic construct; identical to SEQ ID NO: 7299
  source 1..120: mol_type = other DNA

SEQ ID NO: 7304 - DNA, 120 bp, synthetic construct; identical to SEQ ID NO: 7300
  source 1..120: mol_type = other DNA

SEQ ID NO: 7305 - DNA, 120 bp, synthetic construct
  source 1..120: mol_type = other DNA
aaaataaacatacataccttactaaacacacctattttaaataaatataaaaaaaaactaactaatacattccaaaaatattttttctataaaaaaaacattcaaaaattaaattaaatt

SEQ ID NO: 7306 - DNA, 120 bp, synthetic construct
  source 1..120: mol_type = other DNA
aaagtaagtatatatgttttattgggtatatttattttaaataaatgtggaaaaagattagttaatatattttaaaaatattttttttatgaaaaggatatttaaagattgaattaaatt

SEQ ID NO: 7307 - DNA, 120 bp, synthetic construct
  source 1..120: mol_type = other DNA
ttacaaaataaacatacataccttactaaacacacctattttaaataaatataaaaaaaaaacattccaaaaatattttttctataaaaaaaacattcaaaaattaaattaaattatttt

SEQ ID NO: 7308 - DNA, 120 bp, synthetic construct
  source 1..120: mol_type = other DNA
ttataaagtaagtatatatgttttattgggtatatttattttaaataaatgtggaaaaagaatattttaaaaatattttttttatgaaaaggatatttaaagattgaattaaattatttt

SEQ ID NO: 7309 - DNA, 120 bp, synthetic construct; identical to SEQ ID NO: 7305
  source 1..120: mol_type = other DNA

SEQ ID NO: 7310 - DNA, 120 bp, synthetic construct; identical to SEQ ID NO: 7306
  source 1..120: mol_type = other DNA

SEQ ID NO: 7311 - DNA, 120 bp, synthetic construct; identical to SEQ ID NO: 7307
  source 1..120: mol_type = other DNA

SEQ ID NO: 7312 - DNA, 120 bp, synthetic construct; identical to SEQ ID NO: 7308
  source 1..120: mol_type = other DNA

SEQ ID NO: 7313 - DNA, 120 bp, synthetic construct
  source 1..120: mol_type = other DNA
aaaaacaaaaattaaaaaaatatttatacaaataattcatcccaacaattaaaaattctcctaaaaaaaaataacaaaaaaccctttaaaaataaaaaaatcaaaattaataaaaaataa

SEQ ID NO: 7314 - DNA, 120 bp, synthetic construct
  source 1..120: mol_type = other DNA
ggagatagagattaaaggaatatttgtataaataatttattttagtggttgaaagtttttttgaaggagaatgataggggattttttgggaatggaaaggttaagattggtgggagatga

SEQ ID NO: 7315 - DNA, 120 bp, synthetic construct
  source 1..120: mol_type = other DNA
taaaaaaaacaaaaattaaaaaaatatttatacaaataattcatcccaacaattaaaaattaaaaaataacaaaaaaccctttaaaaataaaaaaatcaaaattaataaaaaataacaac

SEQ ID NO: 7316 - DNA, 120 bp, synthetic construct
  source 1..120: mol_type = other DNA
tgggggagatagagattaaaggaatatttgtataaataatttattttagtggttgaaagttggagaatgataggggattttttgggaatggaaaggttaagattggtgggagatgatagt

SEQ ID NO: 7317 - DNA, 120 bp, synthetic construct
  source 1..120: mol_type = other DNA
aaaaacaaaaattaaaaaaatatttatacaaataattcatcccaacgattaaaaattctcctaaaaaaaaataacaaaaaaccctttaaaaataaaaaaatcaaaattaataaaaaataa

SEQ ID NO: 7318 - DNA, 120 bp, synthetic construct
  source 1..120: mol_type = other DNA
ggagatagagattaaaggaatatttgtataaataatttattttagcggttgaaagtttttttgaaggagaatgataggggattttttgggaatggaaaggttaagattggtgggagatga

SEQ ID NO: 7319 - DNA, 120 bp, synthetic construct
  source 1..120: mol_type = other DNA
taaaaaaaacaaaaattaaaaaaatatttatacaaataattcatcccaacgattaaaaattaaaaaataacaaaaaaccctttaaaaataaaaaaatcaaaattaataaaaaataacaac

SEQ ID NO: 7320 - DNA, 120 bp, synthetic construct
  source 1..120: mol_type = other DNA
tgggggagatagagattaaaggaatatttgtataaataatttattttagcggttgaaagttggagaatgataggggattttttgggaatggaaaggttaagattggtgggagatgatagt

SEQ ID NO: 7321 - DNA, 120 bp, synthetic construct
  source 1..120: mol_type = other DNA
ctacccttataatttattttaatcaataaataatatactataaaaattttaatccaaaaccacaaaaaatcttacaacttccactctcctttttctaaaaacccttccaccactacataa

SEQ ID NO: 7322 - DNA, 120 bp, synthetic construct
  source 1..120: mol_type = other DNA
ttatttttgtgatttgttttgattaataaatgatatgttgtaagagttttaatttaaggttataagaggttttatagtttttatttttttttttttgaaaatttttttattattatatga

SEQ ID NO: 7323 - DNA, 120 bp, synthetic construct
  source 1..120: mol_type = other DNA
tcaaactacccttataatttattttaatcaataaataatatactataaaaattttaatccaaaatcttacaacttccactctcctttttctaaaaacccttccaccactacataaacaaa

SEQ ID NO: 7324 - DNA, 120 bp, synthetic construct
  source 1..120: mol_type = other DNA
ttaggttatttttgtgatttgttttgattaataaatgatatgttgtaagagttttaatttaaggttttatagtttttatttttttttttttgaaaatttttttattattatatgaataag

SEQ ID NO: 7325 - DNA, 120 bp, synthetic construct; identical to SEQ ID NO: 7321
  source 1..120: mol_type = other DNA

SEQ ID NO: 7326 - DNA, 120 bp, synthetic construct; identical to SEQ ID NO: 7322
  source 1..120: mol_type = other DNA

SEQ ID NO: 7327 - DNA, 120 bp, synthetic construct; identical to SEQ ID NO: 7323
  source 1..120: mol_type = other DNA

SEQ ID NO: 7328 - DNA, 120 bp, synthetic construct; identical to SEQ ID NO: 7324
  source 1..120: mol_type = other DNA

SEQ ID NO: 7329 - DNA, 120 bp, synthetic construct
  source 1..120: mol_type = other DNA
attcatacttaactctcaactaattttcatataaaaaattaatataataattacctcaataaaaaacaaatatatcttttcattctaaactaaatatcattaaaacttttatatattcaa

SEQ ID NO: 7330 - DNA, 120 bp, synthetic construct
  source 1..120: mol_type = other DNA
atttatatttaatttttgattaatttttgtgtaaggaattggtataatagttattttaatgaggggtaaatatgtttttttattttgggttgagtattattaggatttttatatatttaa

SEQ ID NO: 7331 - DNA, 120 bp, synthetic construct
  source 1..120: mol_type = other DNA
aaaaaattcatacttaactctcaactaattttcatataaaaaattaatataataattacctcaaatatatcttttcattctaaactaaatatcattaaaacttttatatattcaaatata

SEQ ID NO: 7332 - DNA, 120 bp, synthetic construct
  source 1..120: mol_type = other DNA
aaagaatttatatttaatttttgattaatttttgtgtaaggaattggtataatagttattttaaatatgtttttttattttgggttgagtattattaggatttttatatatttaagtgtg

SEQ ID NO: 7333 - DNA, 120 bp, synthetic construct
  source 1..120: mol_type = other DNA
attcatacttaactctcgactaattttcgtataaaaaattaatataataattacctcaataaaaaacaaatatatcttttcattctaaactaaatatcattaaaacttttatatattcaa

SEQ ID NO: 7334 - DNA, 120 bp, synthetic construct
  source 1..120: mol_type = other DNA
atttatatttaattttcgattaattttcgtgtaaggaattggtataatagttattttaatgaggggtaaatatgtttttttattttgggttgagtattattaggatttttatatatttaa

SEQ ID NO: 7335 - DNA, 120 bp, synthetic construct
  source 1..120: mol_type = other DNA
aaaaaattcatacttaactctcgactaattttcgtataaaaaattaatataataattacctcaaatatatcttttcattctaaactaaatatcattaaaacttttatatattcaaatata

SEQ ID NO: 7336 - DNA, 120 bp, synthetic construct
  source 1..120: mol_type = other DNA
aaagaatttatatttaattttcgattaattttcgtgtaaggaattggtataatagttattttaaatatgtttttttattttgggttgagtattattaggatttttatatatttaagtgtg

SEQ ID NO: 7337 - DNA, 120 bp, synthetic construct
  source 1..120: mol_type = other DNA
ttaaataaactaaaacaaatttaaaaaacaataatttaaacattaacctcattccaaattaatataatctaataatctaatattaaatccttaaaaaaaaacttaaaaaataaatttttt

SEQ ID NO: 7338 - DNA, 120 bp, synthetic construct
  source 1..120: mol_type = other DNA
ttgaatgaattgaggtaaatttaaaaggtaataatttaaatattaattttattttaagttaatgtggtttaataatttggtattaaatttttaagagaaagtttgagaaatagatttttt

SEQ ID NO: 7339 - DNA, 120 bp, synthetic construct
  source 1..120: mol_type = other DNA
aactttaaataaactaaaacaaatttaaaaaacaataatttaaacattaacctcattccaaatctaataatctaatattaaatccttaaaaaaaaacttaaaaaataaattttttttatc

SEQ ID NO: 7340 - DNA, 120 bp, synthetic construct
  source 1..120: mol_type = other DNA
agttttgaatgaattgaggtaaatttaaaaggtaataatttaaatattaattttattttaagtttaataatttggtattaaatttttaagagaaagtttgagaaatagattttttttatt

SEQ ID NO: 7341 - DNA, 120 bp, synthetic construct; identical to SEQ ID NO: 7337
  source 1..120: mol_type = other DNA

SEQ ID NO: 7342 - DNA, 120 bp, synthetic construct; identical to SEQ ID NO: 7338
  source 1..120: mol_type = other DNA

SEQ ID NO: 7343 - DNA, 120 bp, synthetic construct; identical to SEQ ID NO: 7339
  source 1..120: mol_type = other DNA

SEQ ID NO: 7344 - DNA, 120 bp, synthetic construct; identical to SEQ ID NO: 7340
  source 1..120: mol_type = other DNA

SEQ ID NO: 7345 - DNA, 120 bp, synthetic construct
  source 1..120: mol_type = other DNA
taatttttaaaaactaaactaaacatattaacataataaccatactactaattaaaacatttaactaacattataatattccattttatatattatccaatcttatttcttcctttcaac

SEQ ID NO: 7346 - DNA, 120 bp, synthetic construct
  source 1..120: mol_type = other DNA
taatttttgaaaattaggttaagtatattaatatagtaattatgttattgattaaaatatttagttaatattataatattttattttgtgtattgtttaattttattttttttttttagt

SEQ ID NO: 7347 - DNA, 120 bp, synthetic construct
  source 1..120: mol_type = other DNA
atcaataatttttaaaaactaaactaaacatattaacataataaccatactactaattaaaaacattataatattccattttatatattatccaatcttatttcttcctttcaacctatc

SEQ ID NO: 7348 - DNA, 120 bp, synthetic construct
  source 1..120: mol_type = other DNA
attagtaatttttgaaaattaggttaagtatattaatatagtaattatgttattgattaaaaatattataatattttattttgtgtattgtttaattttattttttttttttagtttatt

SEQ ID NO: 7349 - DNA, 120 bp, synthetic construct; identical to SEQ ID NO: 7345
  source 1..120: mol_type = other DNA

SEQ ID NO: 7350 - DNA, 120 bp, synthetic construct; identical to SEQ ID NO: 7346
  source 1..120: mol_type = other DNA

SEQ ID NO: 7351 - DNA, 120 bp, synthetic construct; identical to SEQ ID NO: 7347
  source 1..120: mol_type = other DNA

SEQ ID NO: 7352 - DNA, 120 bp, synthetic construct; identical to SEQ ID NO: 7348
  source 1..120: mol_type = other DNA

SEQ ID NO: 7353 - DNA, 120 bp, synthetic construct
  source 1..120: mol_type = other DNA
cttctatttattttaaaaaaaaaaaaaattttaaaatcttttaatacaatatttcaaaaacaattaatatatatctttataataacattacaattatttaaataatacaaataattttat

SEQ ID NO: 7354 - DNA, 120 bp, synthetic construct
  source 1..120: mol_type = other DNA
tttttatttattttaagaaaaaaagaaattttgaagttttttagtgtagtattttagaaatagttaatatgtgtttttatgatggtattgtaattatttggataatatagatgattttgt

SEQ ID NO: 7355 - DNA, 120 bp, synthetic construct
  source 1..120: mol_type = other DNA
cactcttctatttattttaaaaaaaaaaaaaattttaaaatcttttaatacaatatttcaaaatatatatctttataataacattacaattatttaaataatacaaataattttatatta

SEQ ID NO: 7356 - DNA, 120 bp, synthetic construct
  source 1..120: mol_type = other DNA
tatttttttatttattttaagaaaaaaagaaattttgaagttttttagtgtagtattttagaatatgtgtttttatgatggtattgtaattatttggataatatagatgattttgtatta

SEQ ID NO: 7357 - DNA, 120 bp, synthetic construct; identical to SEQ ID NO: 7353
  source 1..120: mol_type = other DNA

SEQ ID NO: 7358 - DNA, 120 bp, synthetic construct; identical to SEQ ID NO: 7354
  source 1..120: mol_type = other DNA

SEQ ID NO: 7359 - DNA, 120 bp, synthetic construct; identical to SEQ ID NO: 7355
  source 1..120: mol_type = other DNA

SEQ ID NO: 7360 - DNA, 120 bp, synthetic construct; identical to SEQ ID NO: 7356
  source 1..120: mol_type = other DNA

SEQ ID NO: 7361 - DNA, 120 bp, synthetic construct
  source 1..120: mol_type = other DNA
caaatctctcatctccataaataaaactaaattaacaccttttaaataaaataacaacaactccaaaaaaactcaaaacaatcccttttcctccaataacctcattctcactctatcttc

SEQ ID NO: 7362 - DNA, 120 bp, synthetic construct
  source 1..120: mol_type = other DNA
tgagttttttatttttatgggtgaggttgagttgatattttttgaatgaagtgatagtagttttaagagggtttagaatagtttttttttttttagtgattttatttttattttgttttt

SEQ ID NO: 7363 - DNA, 120 bp, synthetic construct
  source 1..120: mol_type = other DNA
ctacaaatctctcatctccataaataaaactaaattaacaccttttaaataaaataacaacaaaaaactcaaaacaatcccttttcctccaataacctcattctcactctatcttcacac

SEQ ID NO: 7364 - DNA, 120 bp, synthetic construct
  source 1..120: mol_type = other DNA
ttatgagttttttatttttatgggtgaggttgagttgatattttttgaatgaagtgatagtagagggtttagaatagtttttttttttttagtgattttatttttattttgtttttatat

SEQ ID NO: 7365 - DNA, 120 bp, synthetic construct
  source 1..120: mol_type = other DNA
cgaatctctcatctccataaataaaactaaattaacaccttttaaataaaataacaacaactccaaaaaaactcaaaacaatcccttttcctccaataacctcattctcactctatcttc

SEQ ID NO: 7366 - DNA, 120 bp, synthetic construct
  source 1..120: mol_type = other DNA
cgagttttttatttttatgggtgaggttgagttgatattttttgaatgaagtgatagtagttttaagagggtttagaatagtttttttttttttagtgattttatttttattttgttttt

SEQ ID NO: 7367 - DNA, 120 bp, synthetic construct
  source 1..120: mol_type = other DNA
ctacgaatctctcatctccataaataaaactaaattaacaccttttaaataaaataacaacaaaaaactcaaaacaatcccttttcctccaataacctcattctcactctatcttcacac

SEQ ID NO: 7368 - DNA, 120 bp, synthetic construct
  source 1..120: mol_type = other DNA
ttacgagttttttatttttatgggtgaggttgagttgatattttttgaatgaagtgatagtagagggtttagaatagtttttttttttttagtgattttatttttattttgtttttatat

SEQ ID NO: 7369 - DNA, 120 bp, synthetic construct
  source 1..120: mol_type = other DNA
taaaccatttatttttaataccacaataataatatttattcatattaaatttaacacaatataaaacaatactaaatttcacatctaaaaattaaatttaaatcctaattctaacacttt

SEQ ID NO: 7370 - DNA, 120 bp, synthetic construct
  source 1..120: mol_type = other DNA
taagttatttatttttggtattataatagtgatatttatttatgttggatttgatatagtatgaagtagtattaaattttatatttgaagattaggtttgaattttggttttgatgtttt

SEQ ID NO: 7371 - DNA, 120 bp, synthetic construct
  source 1..120: mol_type = other DNA
ctatctaaaccatttatttttaataccacaataataatatttattcatattaaatttaacacaatactaaatttcacatctaaaaattaaatttaaatcctaattctaacactttttaaa

SEQ ID NO: 7372 - DNA, 120 bp, synthetic construct
  source 1..120: mol_type = other DNA
ttgtttaagttatttatttttggtattataatagtgatatttatttatgttggatttgatatagtattaaattttatatttgaagattaggtttgaattttggttttgatgttttttaga

SEQ ID NO: 7373 - DNA, 120 bp, synthetic construct
  source 1..120: mol_type = other DNA
taaaccatttatttttaataccacaataataatatttattcatattaaatttaacacaatataaaacaatactaaatttcacatctaaaaattaaatttaaatcctaattctaacgcttt

SEQ ID NO: 7374 - DNA, 120 bp, synthetic construct
  source 1..120: mol_type = other DNA
taagttatttatttttggtattataatagtgatatttatttatgttggatttgatatagtatgaagtagtattaaattttatatttgaagattaggtttgaattttggttttgacgtttt

SEQ ID NO: 7375 - DNA, 120 bp, synthetic construct
  source 1..120: mol_type = other DNA
ctatctaaaccatttatttttaataccacaataataatatttattcatattaaatttaacacaatactaaatttcacatctaaaaattaaatttaaatcctaattctaacgctttttaaa

SEQ ID NO: 7376 - DNA, 120 bp, synthetic construct
  source 1..120: mol_type = other DNA
ttgtttaagttatttatttttggtattataatagtgatatttatttatgttggatttgatatagtattaaattttatatttgaagattaggtttgaattttggttttgacgttttttaga

SEQ ID NO: 7377 - DNA, 120 bp, synthetic construct
  source 1..120: mol_type = other DNA
acttccccaataatacaaatctttccattataccacttaaaccaaaaccaataacccatcaataaaaaccttcctttccaataacaaaaaaaaaaatcattataaatacttacaattata

SEQ ID NO: 7378 - DNA, 120 bp, synthetic construct
  source 1..120: mol_type = other DNA
gtttttttagtggtgtaagtttttttattgtattatttaggttaaagttagtgatttattaatgagaatttttttttttagtagtaggaagaagggttattgtaaatatttataattgtg

SEQ ID NO: 7379 - DNA, 120 bp, synthetic construct
  source 1..120: mol_type = other DNA
ccccaataatacaaatctttccattataccacttaaaccaaaaccaataacccatcaattcaaatataaaaaccttcctttccaataacaaaaaaaaaaatcattataaatacttacaat

SEQ ID NO: 7380 - DNA, 120 bp, synthetic construct
  source 1..120: mol_type = other DNA
ttttagtggtgtaagtttttttattgtattatttaggttaaagttagtgatttattaatttagatatgagaatttttttttttagtagtaggaagaagggttattgtaaatatttataat

SEQ ID NO: 7381 - DNA, 120 bp, synthetic construct; identical to SEQ ID NO: 7377
  source 1..120: mol_type = other DNA

SEQ ID NO: 7382 - DNA, 120 bp, synthetic construct; identical to SEQ ID NO: 7378
  source 1..120: mol_type = other DNA

SEQ ID NO: 7383 - DNA, 120 bp, synthetic construct; identical to SEQ ID NO: 7379
  source 1..120: mol_type = other DNA

SEQ ID NO: 7384 - DNA, 120 bp, synthetic construct; identical to SEQ ID NO: 7380
  source 1..120: mol_type = other DNA

SEQ ID NO: 7385 - DNA, 120 bp, synthetic construct
  source 1..120: mol_type = other DNA
ttaatacctatataaaaaaaaaaatttacttatttatttattttcttaaaatacctttttcaaatcttaacattttattctacttttataaaacaaatttaaaaatatttcctcttattc

SEQ ID NO: 7386 - DNA, 120 bp, synthetic construct
  source 1..120: mol_type = other DNA
ttggtatttatgtgaaggaaagggtttgtttgtttgtttgtttttttggaatgttttttttaggttttgatattttattttgtttttataaaataagtttagaagtgtttttttttattt

SEQ ID NO: 7387 - DNA, 120 bp, synthetic construct
  source 1..120: mol_type = other DNA
tattttaatacctatataaaaaaaaaaatttacttatttatttattttcttaaaataccttttaacattttattctacttttataaaacaaatttaaaaatatttcctcttattctctac

SEQ ID NO: 7388 - DNA, 120 bp, synthetic construct
  source 1..120: mol_type = other DNA
tgttttggtatttatgtgaaggaaagggtttgtttgtttgtttgtttttttggaatgttttttgatattttattttgtttttataaaataagtttagaagtgtttttttttattttttgt

SEQ ID NO: 7389 - DNA, 120 bp, synthetic construct; identical to SEQ ID NO: 7385
  source 1..120: mol_type = other DNA

SEQ ID NO: 7390 - DNA, 120 bp, synthetic construct; identical to SEQ ID NO: 7386
  source 1..120: mol_type = other DNA

SEQ ID NO: 7391 - DNA, 120 bp, synthetic construct; identical to SEQ ID NO: 7387
  source 1..120: mol_type = other DNA

SEQ ID NO: 7392 - DNA, 120 bp, synthetic construct; identical to SEQ ID NO: 7388
  source 1..120: mol_type = other DNA

SEQ ID NO: 7393 - DNA, 120 bp, synthetic construct
  source 1..120: mol_type = other DNA
atcactaaaacttataaacaaaaatatatttcaaccctcaatatctaccttatacacaacaaatacttaataaataattataatataataatacttaacatttcataaattattaaaatt

SEQ ID NO: 7394 - DNA, 120 bp, synthetic construct
  source 1..120: mol_type = other DNA
gttattgaagtttataagtaaggatatattttagtttttagtgtttgttttgtatatagtaggtgtttagtaaatggttgtaatgtggtaatgtttgatgttttatgggttgttggaatt

SEQ ID NO: 7395 - DNA, 120 bp, synthetic construct
  source 1..120: mol_type = other DNA
ccaatcactaaaacttataaacaaaaatatatttcaaccctcaatatctaccttatacacaacttaataaataattataatataataatacttaacatttcataaattattaaaattaac

SEQ ID NO: 7396 - DNA, 120 bp, synthetic construct
  source 1..120: mol_type = other DNA
ttagttattgaagtttataagtaaggatatattttagtttttagtgtttgttttgtatatagtttagtaaatggttgtaatgtggtaatgtttgatgttttatgggttgttggaattaat

SEQ ID NO: 7397 - DNA, 120 bp, synthetic construct
  source 1..120: mol_type = other DNA
atcactaaaacttataaacaaaaatatatttcaaccctcaatatctaccttatacacaacaaatacttaataaataattataatataataatacttaacgtttcataaattattaaaatt

SEQ ID NO: 7398 - DNA, 120 bp, synthetic construct
  source 1..120: mol_type = other DNA
gttattgaagtttataagtaaggatatattttagtttttagtgtttgttttgtatatagtaggtgtttagtaaatggttgtaatgtggtaatgtttgacgttttatgggttgttggaatt

SEQ ID NO: 7399 - DNA, 120 bp, synthetic construct
  source 1..120: mol_type = other DNA
ccaatcactaaaacttataaacaaaaatatatttcaaccctcaatatctaccttatacacaacttaataaataattataatataataatacttaacgtttcataaattattaaaattaac

SEQ ID NO: 7400 - DNA, 120 bp, synthetic construct
  source 1..120: mol_type = other DNA
ttagttattgaagtttataagtaaggatatattttagtttttagtgtttgttttgtatatagtttagtaaatggttgtaatgtggtaatgtttgacgttttatgggttgttggaattaat

SEQ ID NO: 7401 - DNA, 120 bp, synthetic construct
  source 1..120: mol_type = other DNA
cctaaattttctctacccccaaaaatatactaatcctaaccttactattacccttaccctaaatactaacaccctttaaactactcttacctaaaatttaaaccaaaattcaaataaaac

SEQ ID NO: 7402 - DNA, 120 bp, synthetic construct
  source 1..120: mol_type = other DNA
tttgggttttttttatttttaggaatatgttgattttggttttattgttatttttgttttgggtattggtattttttgggttgtttttgtttggaatttgaattaaagtttaaatgagat

SEQ ID NO: 7403 - DNA, 120 bp, synthetic construct
  source 1..120: mol_type = other DNA
atccctaaattttctctacccccaaaaatatactaatcctaaccttactattacccttaccctaacaccctttaaactactcttacctaaaatttaaaccaaaattcaaataaaacttct

SEQ ID NO: 7404 - DNA, 120 bp, synthetic construct
  source 1..120: mol_type = other DNA
gtttttgggttttttttatttttaggaatatgttgattttggttttattgttatttttgttttggtattttttgggttgtttttgtttggaatttgaattaaagtttaaatgagattttt

SEQ ID NO: 7405 - DNA, 120 bp, synthetic construct; identical to SEQ ID NO: 7401
  source 1..120: mol_type = other DNA

SEQ ID NO: 7406 - DNA, 120 bp, synthetic construct; identical to SEQ ID NO: 7402
  source 1..120: mol_type = other DNA

SEQ ID NO: 7407 - DNA, 120 bp, synthetic construct; identical to SEQ ID NO: 7403
  source 1..120: mol_type = other DNA

SEQ ID NO: 7408 - DNA, 120 bp, synthetic construct; identical to SEQ ID NO: 7404
  source 1..120: mol_type = other DNA

SEQ ID NO: 7409 - DNA, 120 bp, synthetic construct
  source 1..120: mol_type = other DNA
acaaaaactaacccaaccacaaccccatatacataaaaacaactacatcctatccctaccttaacctatacaaacctcatttccttcactctaaaactacctacaaaatttctttctaaa

SEQ ID NO: 7410 - DNA, 120 bp, synthetic construct
  source 1..120: mol_type = other DNA
gtaggagttggtttggttatagttttatatgtatgaggatggttgtgttttgtttttgttttggtttgtatgaattttattttttttattttggagttgtttatgggatttttttttggg

SEQ ID NO: 7411 - DNA, 120 bp, synthetic construct
  source 1..120: mol_type = other DNA
aactaacccaaccacaaccccatatacataaaaacaactacatcctatccctaccttaacaaaaaataacctatacaaacctcatttccttcactctaaaactacctacaaaatttcttt

SEQ ID NO: 7412 - DNA, 120 bp, synthetic construct
  source 1..120: mol_type = other DNA
agttggtttggttatagttttatatgtatgaggatggttgtgttttgtttttgttttggtaggaaatggtttgtatgaattttattttttttattttggagttgtttatgggattttttt

SEQ ID NO: 7413 - DNA, 120 bp, synthetic construct
  source 1..120: mol_type = other DNA
acaaaaactaacccgaccacaaccccatatacataaaaacgactacgtcctatccctaccttaacctatacgaacctcatttccttcactctaaaactacctacgaaatttctttctaaa

SEQ ID NO: 7414 - DNA, 120 bp, synthetic construct
  source 1..120: mol_type = other DNA
gtaggagttggttcggttatagttttatatgtatgaggacggttgcgttttgtttttgttttggtttgtacgaattttattttttttattttggagttgtttacgggatttttttttggg

SEQ ID NO: 7415 - DNA, 120 bp, synthetic construct
  source 1..120: mol_type = other DNA
aactaacccgaccacaaccccatatacataaaaacgactacgtcctatccctaccttaacaaaaaataacctatacgaacctcatttccttcactctaaaactacctacgaaatttcttt

SEQ ID NO: 7416 - DNA, 120 bp, synthetic construct
  source 1..120: mol_type = other DNA
agttggttcggttatagttttatatgtatgaggacggttgcgttttgtttttgttttggtaggaaatggtttgtacgaattttattttttttattttggagttgtttacgggattttttt

SEQ ID NO: 7417 - DNA, 120 bp, synthetic construct
  source 1..120: mol_type = other DNA
acttttcaataactttaaaaattatcaccttataatataaattctaaccaaaaaacctaaaaatcctaaaattaaaaaaaaaatttataaaaaccaaataataaataaaatcctaactct

SEQ ID NO: 7418 - DNA, 120 bp, synthetic construct
  source 1..120: mol_type = other DNA
attttttaataattttaagaattgttattttgtaatataagttttgattaagggatttgaaagttttaaagttagagaaggagtttatggaggttaggtagtaaatagaattttagtttt

SEQ ID NO: 7419 - DNA, 120 bp, synthetic construct
  source 1..120: mol_type = other DNA
tcaataactttaaaaattatcaccttataatataaattctaaccaaaaaacctaaaataccatcataatcctaaaattaaaaaaaaaatttataaaaaccaaataataaataaaatccta

SEQ ID NO: 7420 - DNA, 120 bp, synthetic construct
  source 1..120: mol_type = other DNA
ttaataattttaagaattgttattttgtaatataagttttgattaagggatttgaaatgttattgtagttttaaagttagagaaggagtttatggaggttaggtagtaaatagaatttta

SEQ ID NO: 7421 - DNA, 120 bp, synthetic construct; identical to SEQ ID NO: 7417
  source 1..120: mol_type = other DNA

SEQ ID NO: 7422 - DNA, 120 bp, synthetic construct; identical to SEQ ID NO: 7418
  source 1..120: mol_type = other DNA

SEQ ID NO: 7423 - DNA, 120 bp, synthetic construct
  source 1..120: mol_type = other DNA
tcaataactttaaaaattatcaccttataatataaattctaaccaaaaaacctaaaataccatcgtaatcctaaaattaaaaaaaaaatttataaaaaccaaataataaataaaatccta

SEQ ID NO: 7424 - DNA, 120 bp, synthetic construct
  source 1..120: mol_type = other DNA
ttaataattttaagaattgttattttgtaatataagttttgattaagggatttgaaatgttatcgtagttttaaagttagagaaggagtttatggaggttaggtagtaaatagaatttta

SEQ ID NO: 7425 - DNA, 120 bp, synthetic construct
  source 1..120: mol_type = other DNA
ttacacaattaaaaaaatataaatcccaaactttataaaaaattaaaataaacacaaaataaatacatattacaaatcattactaaaaaaaaacaaatacatttaacctcaaaattaact

SEQ ID NO: 7426 - DNA, 120 bp, synthetic construct
  source 1..120: mol_type = other DNA
ttatatagttaagagagtgtgaattttaggttttgtgaaagattaaaataagtataaaataaatgtatgttataaattattattgaaaaggagtaaatgtatttaattttaaagttagtt

SEQ ID NO: 7427 - DNA, 120 bp, synthetic construct
  source 1..120: mol_type = other DNA
caattaaaaaaatataaatcccaaactttataaaaaattaaaataaacacaaaataaaaaattccaatacatattacaaatcattactaaaaaaaaacaaatacatttaacctcaaaatt

SEQ ID NO: 7428 - DNA, 120 bp, synthetic construct
  source 1..120: mol_type = other DNA
tagttaagagagtgtgaattttaggttttgtgaaagattaaaataagtataaaataaaaggttttaatgtatgttataaattattattgaaaaggagtaaatgtatttaattttaaagtt

SEQ ID NO: 7429 - DNA, 120 bp, synthetic construct; identical to SEQ ID NO: 7425
  source 1..120: mol_type = other DNA

SEQ ID NO: 7430 - DNA, 120 bp, synthetic construct; identical to SEQ ID NO: 7426
  source 1..120: mol_type = other DNA

SEQ ID NO: 7431 - DNA, 120 bp, synthetic construct; identical to SEQ ID NO: 7427
  source 1..120: mol_type = other DNA

SEQ ID NO: 7432 - DNA, 120 bp, synthetic construct; identical to SEQ ID NO: 7428
  source 1..120: mol_type = other DNA

SEQ ID NO: 7433 - DNA, 120 bp, synthetic construct
  source 1..120: mol_type = other DNA
atatcatctcacatatattaatttacttctatttaacacatatctcctcctccaaactaaaaaatcaaaaactacatctattctactcaactcaatatctcaatacctaataccttctaa

SEQ ID NO: 7434 - DNA, 120 bp, synthetic construct
  source 1..120: mol_type = other DNA
gtgttattttatatgtattagtttgtttttgtttagtatatgtttttttttttagattggaaggttagggattgtatttgttttgtttaatttagtgttttagtgtttggtattttttgg

SEQ ID NO: 7435 - DNA, 120 bp, synthetic construct
  source 1..120: mol_type = other DNA
atctcacatatattaatttacttctatttaacacatatctcctcctccaaactaaaacctccataaaatcaaaaactacatctattctactcaactcaatatctcaatacctaatacctt

SEQ ID NO: 7436 - DNA, 120 bp, synthetic construct
  source 1..120: mol_type = other DNA
attttatatgtattagtttgtttttgtttagtatatgtttttttttttagattggaatttttatgaggttagggattgtatttgttttgtttaatttagtgttttagtgtttggtatttt

SEQ ID NO: 7437 - DNA, 120 bp, synthetic construct; identical to SEQ ID NO: 7433
  source 1..120: mol_type = other DNA

SEQ ID NO: 7438 - DNA, 120 bp, synthetic construct; identical to SEQ ID NO: 7434
  source 1..120: mol_type = other DNA

SEQ ID NO: 7439 - DNA, 120 bp, synthetic construct; identical to SEQ ID NO: 7435
  source 1..120: mol_type = other DNA

SEQ ID NO: 7440 - DNA, 120 bp, synthetic construct; identical to SEQ ID NO: 7436
  source 1..120: mol_type = other DNA

SEQ ID NO: 7441 - DNA, 120 bp, synthetic construct
  source 1..120: mol_type = other DNA
catcaaaattcaaaaatttaaatcccaactccattacataataataatataaatttcaaattaattaatctctaaatacttcaattttctcatctataaaataaaaaaaacaatactttc

SEQ ID NO: 7442 - DNA, 120 bp, synthetic construct
  source 1..120: mol_type = other DNA
tattagaatttaggggtttgaattttagttttattatgtagtagtagtataaattttaaattaattaatttttaggtattttagtttttttatttgtaaaatggagaaaatagtgttttt

SEQ ID NO: 7443 - DNA, 120 bp, synthetic construct
  source 1..120: mol_type = other DNA
aaaattcaaaaatttaaatcccaactccattacataataataatataaatttcaaattatactactaattaatctctaaatacttcaattttctcatctataaaataaaaaaaacaatac

SEQ ID NO: 7444 - DNA, 120 bp, synthetic construct
  source 1..120: mol_type = other DNA
agaatttaggggtttgaattttagttttattatgtagtagtagtataaattttaaattatattattaattaatttttaggtattttagtttttttatttgtaaaatggagaaaatagtgt

SEQ ID NO: 7445 - DNA, 120 bp, synthetic construct
  source 1..120: mol_type = other DNA
catcaaaattcaaaaatttaaatcccaactccattacgtaataataatataaatttcaaattaattaatctctaaatacttcaattttctcatctataaaataaaaaaaacaatactttc

SEQ ID NO: 7446 - DNA, 120 bp, synthetic construct
  source 1..120: mol_type = other DNA
tattagaatttaggggtttgaattttagttttattacgtagtagtagtataaattttaaattaattaatttttaggtattttagtttttttatttgtaaaatggagaaaatagtgttttt

SEQ ID NO: 7447 - DNA, 120 bp, synthetic construct
  source 1..120: mol_type = other DNA
aaaattcaaaaatttaaatcccaactccattacgtaataataatataaatttcaaattatactactaattaatctctaaatacttcaattttctcatctataaaataaaaaaaacaatac

SEQ ID NO: 7448 - DNA, 120 bp, synthetic construct
  source 1..120: mol_type = other DNA
agaatttaggggtttgaattttagttttattacgtagtagtagtataaattttaaattatattattaattaatttttaggtattttagtttttttatttgtaaaatggagaaaatagtgt

SEQ ID NO: 7449 - DNA, 120 bp, synthetic construct
  source 1..120: mol_type = other DNA
aaaaataattatttacactcccaaaaaattttcaccaaaaccctatacttaccatctcttaattcacttcctaacaccacattctaaaattaaaatattaaaacaactctctaaccttct

SEQ ID NO: 7450 - DNA, 120 bp, synthetic construct
  source 1..120: mol_type = other DNA
ggaggtagttatttgtatttttagaaaatttttattaaggttttgtgtttgttattttttagtttattttttgatattatattttgaaattgagatgttggaatgattttttgatttttt

SEQ ID NO: 7451 - DNA, 120 bp, synthetic construct
  source 1..120: mol_type = other DNA
ctcaaaaaataattatttacactcccaaaaaattttcaccaaaaccctatacttaccatctcttcctaacaccacattctaaaattaaaatattaaaacaactctctaaccttctctact

SEQ ID NO: 7452 - DNA, 120 bp, synthetic construct
  source 1..120: mol_type = other DNA
tttaggaggtagttatttgtatttttagaaaatttttattaaggttttgtgtttgttatttttttttgatattatattttgaaattgagatgttggaatgattttttgattttttttgtt

SEQ ID NO: 7453 - DNA, 120 bp, synthetic construct
  source 1..120: mol_type = other DNA
aaaaataattatttacactcccaaaaaattttcaccaaaaccctatacttaccatctcttaattcacttcctaacaccacattctaaaattaaaatattaaaacgactctctaaccttct

SEQ ID NO: 7454 - DNA, 120 bp, synthetic construct
  source 1..120: mol_type = other DNA
ggaggtagttatttgtatttttagaaaatttttattaaggttttgtgtttgttattttttagtttattttttgatattatattttgaaattgagatgttggaacgattttttgatttttt

SEQ ID NO: 7455 - DNA, 120 bp, synthetic construct
  source 1..120: mol_type = other DNA
ctcaaaaaataattatttacactcccaaaaaattttcaccaaaaccctatacttaccatctcttcctaacaccacattctaaaattaaaatattaaaacgactctctaaccttctctact

SEQ ID NO: 7456 - DNA, 120 bp, synthetic construct
  source 1..120: mol_type = other DNA
tttaggaggtagttatttgtatttttagaaaatttttattaaggttttgtgtttgttatttttttttgatattatattttgaaattgagatgttggaacgattttttgattttttttgtt

SEQ ID NO: 7457 - DNA, 120 bp, synthetic construct
  source 1..120: mol_type = other DNA
aaaaaacaatacttaattaatattctcacccaataaaacaataattaaaattaccaatcttactaatatctataaaaaaaattcccaattattattactattacttctacattttcaaaa

SEQ ID NO: 7458 - DNA, 120 bp, synthetic construct
  source 1..120: mol_type = other DNA
gagaagtaatatttggttaatatttttatttagtgagatagtagttaggattattagttttattaatatttgtagaaagggtttttaattgttattgttgttgtttttgtatttttagga

SEQ ID NO: 7459 - DNA, 120 bp, synthetic construct
  source 1..120: mol_type = other DNA
aacaatacttaattaatattctcacccaataaaacaataattaaaattaccaatcttacactaaactaatatctataaaaaaaattcccaattattattactattacttctacattttca

SEQ ID NO: 7460 - DNA, 120 bp, synthetic construct
  source 1..120: mol_type = other DNA
agtaatatttggttaatatttttatttagtgagatagtagttaggattattagttttatattgaattaatatttgtagaaagggtttttaattgttattgttgttgtttttgtattttta

SEQ ID NO: 7461 - DNA, 120 bp, synthetic construct; identical to SEQ ID NO: 7457
  source 1..120: mol_type = other DNA

SEQ ID NO: 7462 - DNA, 120 bp, synthetic construct; identical to SEQ ID NO: 7458
  source 1..120: mol_type = other DNA

SEQ ID NO: 7463 - DNA, 120 bp, synthetic construct; identical to SEQ ID NO: 7459
  source 1..120: mol_type = other DNA

SEQ ID NO: 7464 - DNA, 120 bp, synthetic construct; identical to SEQ ID NO: 7460
  source 1..120: mol_type = other DNA

SEQ ID NO: 7465 - DNA, 120 bp, synthetic construct
  source 1..120: mol_type = other DNA
ccctacctctcaaaacccaatacccattcacaaaaaaccaacacccctataactacctctaaaaactaatattaaccctaactaacttaaaaaccataaaatccactaaataaaaaccca

SEQ ID NO: 7466 - DNA, 120 bp, synthetic construct
  source 1..120: mol_type = other DNA
ttttgttttttaggatttaatgtttgtttataggaggttaatatttttgtggttgtttttggaggttggtattggttttagttggtttggaggttatggggtttattgggtgaagattta

SEQ ID NO: 7467 - DNA, 120 bp, synthetic construct
  source 1..120: mol_type = other DNA
acctctcaaaacccaatacccattcacaaaaaaccaacacccctataactacctctaaaaacataaaactaatattaaccctaactaacttaaaaaccataaaatccactaaataaaaac

SEQ ID NO: 7468 - DNA, 120 bp, synthetic construct
  source 1..120: mol_type = other DNA
gttttttaggatttaatgtttgtttataggaggttaatatttttgtggttgtttttgggggtatgaggttggtattggttttagttggtttggaggttatggggtttattgggtgaagat

SEQ ID NO: 7469 - DNA, 120 bp, synthetic construct
  source 1..120: mol_type = other DNA
ccctacctctcaaaacccaatacccgttcacaaaaaaccaacacccctataactacctctaaaaactaatattaaccctaactaacttaaaaaccataaaatccactaaataaaaaccca

SEQ ID NO: 7470 - DNA, 120 bp, synthetic construct
  source 1..120: mol_type = other DNA
ttttgttttttaggatttaatgttcgtttataggaggttaatatttttgtggttgtttttggaggttggtattggttttagttggtttggaggttatggggtttattgggtgaagattta

SEQ ID NO: 7471 - DNA, 120 bp, synthetic construct
  source 1..120: mol_type = other DNA
acctctcaaaacccaatacccgttcacaaaaaaccaacacccctataactacctctaaaaacataaaactaatattaaccctaactaacttaaaaaccataaaatccactaaataaaaac

SEQ ID NO: 7472 - DNA, 120 bp, synthetic construct
  source 1..120: mol_type = other DNA
gttttttaggatttaatgttcgtttataggaggttaatatttttgtggttgtttttgggggtatgaggttggtattggttttagttggtttggaggttatggggtttattgggtgaagat

SEQ ID NO: 7473 - DNA, 120 bp, synthetic construct
  source 1..120: mol_type = other DNA
acataaatcttaaaaataatatactatataaaaaaaaaccaatctccaaaaacttattttaaaaattctttatatattttatatattaatcctttaaaaaatatacaattactaatattt

SEQ ID NO: 7474 - DNA, 120 bp, synthetic construct
  source 1..120: mol_type = other DNA
gtatggattttaaggatagtatgttgtgtgaaaaaaagttaatttttaaaggtttgttttgagagttttttatgtattttgtgtattagttttttgggagatatgtagttgttggtattt

SEQ ID NO: 7475 - DNA, 120 bp, synthetic construct
  source 1..120: mol_type = other DNA
accttacataaatcttaaaaataatatactatataaaaaaaaaccaatctccaaaaacttatctttatatattttatatattaatcctttaaaaaatatacaattactaatatttttttc

SEQ ID NO: 7476 - DNA, 120 bp, synthetic construct
  source 1..120: mol_type = other DNA
gttttgtatggattttaaggatagtatgttgtgtgaaaaaaagttaatttttaaaggtttgtttttatgtattttgtgtattagttttttgggagatatgtagttgttggtatttttttt

SEQ ID NO: 7477 - DNA, 120 bp, synthetic construct; identical to SEQ ID NO: 7473
  source 1..120: mol_type = other DNA

SEQ ID NO: 7478 - DNA, 120 bp, synthetic construct; identical to SEQ ID NO: 7474
  source 1..120: mol_type = other DNA

SEQ ID NO: 7479 - DNA, 120 bp, synthetic construct; identical to SEQ ID NO: 7475
  source 1..120: mol_type = other DNA

SEQ ID NO: 7480 - DNA, 120 bp, synthetic construct; identical to SEQ ID NO: 7476
  source 1..120: mol_type = other DNA

SEQ ID NO: 7481 - DNA, 120 bp, synthetic construct
  source 1..120: mol_type = other DNA
actatataaatacccttataacataataactaacttccccaaaataacacctataaactacaacacctacataacctaatcttaaaaatcaccccctattacttccactttcttctataa

SEQ ID NO: 7482 - DNA, 120 bp, synthetic construct
  source 1..120: mol_type = other DNA
gttgtgtgagtgtttttatggtatgatagttggtttttttaaaataatatttgtaagttgtaatgtttgtatgatttggttttggaaattattttttattatttttatttttttttgtga

SEQ ID NO: 7483 - DNA, 120 bp, synthetic construct
  source 1..120: mol_type = other DNA
aaaaactatataaatacccttataacataataactaacttccccaaaataacacctataaactacataacctaatcttaaaaatcaccccctattacttccactttcttctataaaccac

SEQ ID NO: 7484 - DNA, 120 bp, synthetic construct
  source 1..120: mol_type = other DNA
aagggttgtgtgagtgtttttatggtatgatagttggtttttttaaaataatatttgtaagttgtatgatttggttttggaaattattttttattatttttatttttttttgtgagttat

SEQ ID NO: 7485 - DNA, 120 bp, synthetic construct
  source 1..120: mol_type = other DNA
actatataaatacccttataacataataactaacttccccaaaataacacctataaactacaacgcctacataacctaatcttaaaaatcaccccctattacttccactttcttctataa

SEQ ID NO: 7486 - DNA, 120 bp, synthetic construct
  source 1..120: mol_type = other DNA
gttgtgtgagtgtttttatggtatgatagttggtttttttaaaataatatttgtaagttgtaacgtttgtatgatttggttttggaaattattttttattatttttatttttttttgtga

SEQ ID NO: 7487 - DNA, 120 bp, synthetic construct; identical to SEQ ID NO: 7483
  source 1..120: mol_type = other DNA

SEQ ID NO: 7488 - DNA, 120 bp, synthetic construct; identical to SEQ ID NO: 7484
  source 1..120: mol_type = other DNA

SEQ ID NO: 7489 - DNA, 120 bp, synthetic construct
  source 1..120: mol_type = other DNA
accttaaactaccaaaatatctttataaaatataacataataaaatcaaacacacttaaaatccaatccaactaacaaataacaaaccttaaacaaaatactcaatttcattcaatttcc

SEQ ID NO: 7490 - DNA, 120 bp, synthetic construct
  source 1..120: mol_type = other DNA
gttttgaattgttaaggtgtttttgtgaaatgtggtataatagagttagatatatttgggatttagtttggttaataggtgatagattttgggtaaggtatttagttttatttagttttt

SEQ ID NO: 7491 - DNA, 120 bp, synthetic construct
  source 1..120: mol_type = other DNA
tcctaccttaaactaccaaaatatctttataaaatataacataataaaatcaaacacacttatccaactaacaaataacaaaccttaaacaaaatactcaatttcattcaatttccacct

SEQ ID NO: 7492 - DNA, 120 bp, synthetic construct
  source 1..120: mol_type = other DNA
ttttgttttgaattgttaaggtgtttttgtgaaatgtggtataatagagttagatatatttgtttggttaataggtgatagattttgggtaaggtatttagttttatttagtttttattt

SEQ ID NO: 7493 - DNA, 120 bp, synthetic construct
  source 1..120: mol_type = other DNA
accttaaactaccaaaatatctttataaaatataacataataaaatcaaacacacttaaaatccaatccgactaacaaataacaaaccttaaacaaaatactcaatttcattcaatttcc

SEQ ID NO: 7494 - DNA, 120 bp, synthetic construct
  source 1..120: mol_type = other DNA
gttttgaattgttaaggtgtttttgtgaaatgtggtataatagagttagatatatttgggatttagttcggttaataggtgatagattttgggtaaggtatttagttttatttagttttt

SEQ ID NO: 7495 - DNA, 120 bp, synthetic construct
  source 1..120: mol_type = other DNA
tcctaccttaaactaccaaaatatctttataaaatataacataataaaatcaaacacacttatccgactaacaaataacaaaccttaaacaaaatactcaatttcattcaatttccacct

SEQ ID NO: 7496 - DNA, 120 bp, synthetic construct
  source 1..120: mol_type = other DNA
ttttgttttgaattgttaaggtgtttttgtgaaatgtggtataatagagttagatatatttgttcggttaataggtgatagattttgggtaaggtatttagttttatttagtttttattt

SEQ ID NO: 7497 - DNA, 120 bp, synthetic construct
  source 1..120: mol_type = other DNA
ttatcaataaaaaataaacttaaaaaaatactttataattaattttaaaaaatcatatttaatacatttctacttaacataaacaataattaaaaaataaaccataaaattccacataaa

SEQ ID NO: 7498 - DNA, 120 bp, synthetic construct
  source 1..120: mol_type = other DNA
ttgttaataaaagataggtttggaagggtgttttgtgattaattttggaaaattatatttaatatatttttatttgatatagataatagttaaaaaatggattataaaattttatataaa

SEQ ID NO: 7499 - DNA, 120 bp, synthetic construct
  source 1..120: mol_type = other DNA
aataaaaaataaacttaaaaaaatactttataattaattttaaaaaatcatatttaatattaaaatatacatttctacttaacataaacaataattaaaaaataaaccataaaattccac

SEQ ID NO: 7500 - DNA, 120 bp, synthetic construct
  source 1..120: mol_type = other DNA
aataaaagataggtttggaagggtgttttgtgattaattttggaaaattatatttaatattagaatatatatttttatttgatatagataatagttaaaaaatggattataaaattttat

SEQ ID NO: 7501 - DNA, 120 bp, synthetic construct; identical to SEQ ID NO: 7497
  source 1..120: mol_type = other DNA

SEQ ID NO: 7502 - DNA, 120 bp, synthetic construct; identical to SEQ ID NO: 7498
  source 1..120: mol_type = other DNA

SEQ ID NO: 7503 - DNA, 120 bp, synthetic construct; identical to SEQ ID NO: 7499
  source 1..120: mol_type = other DNA

SEQ ID NO: 7504 - DNA, 120 bp, synthetic construct; identical to SEQ ID NO: 7500
  source 1..120: mol_type = other DNA

SEQ ID NO: 7505 - DNA, 120 bp, synthetic construct
  source 1..120: mol_type = other DNA
ttactaacactccttacctaaaataccaaaccaataccaataaactatcaaactataaaaaaaaataaatacaaaaccacaacctaaacacaacaaaaaaaacatctctataaaataata

SEQ ID NO: 7506 - DNA, 120 bp, synthetic construct
  source 1..120: mol_type = other DNA
ttattggtattttttgtttggaatgttaagttaatgttagtgagttgttaggttgtaggggaaaatgggtgtagggttataatttaggtatagtaggggaggtatttttgtgagatgatg

SEQ ID NO: 7507 - DNA, 120 bp, synthetic construct
  source 1..120: mol_type = other DNA
aacactccttacctaaaataccaaaccaataccaataaactatcaaactataaaaaaacaaaattaaaataaatacaaaaccacaacctaaacacaacaaaaaaaacatctctataaaat

SEQ ID NO: 7508 - DNA, 120 bp, synthetic construct
  source 1..120: mol_type = other DNA
ggtattttttgtttggaatgttaagttaatgttagtgagttgttaggttgtaggggaataaggttaaaatgggtgtagggttataatttaggtatagtaggggaggtatttttgtgagat

SEQ ID NO: 7509 - DNA, 120 bp, synthetic construct; identical to SEQ ID NO: 7505
  source 1..120: mol_type = other DNA

SEQ ID NO: 7510 - DNA, 120 bp, synthetic construct; identical to SEQ ID NO: 7506
  source 1..120: mol_type = other DNA

SEQ ID NO: 7511 - DNA, 120 bp, synthetic construct; identical to SEQ ID NO: 7507
  source 1..120: mol_type = other DNA

SEQ ID NO: 7512 - DNA, 120 bp, synthetic construct; identical to SEQ ID NO: 7508
  source 1..120: mol_type = other DNA

SEQ ID NO: 7513 - DNA, 120 bp, synthetic construct
  source 1..120: mol_type = other DNA
tcctcaacttcatccctaaaatacatattctctactctcattataatatataaatataccttaatctctaaacaaccaatttaaaaattaatctaaaattaactaaaatattcttcctcc

SEQ ID NO: 7514 - DNA, 120 bp, synthetic construct
  source 1..120: mol_type = other DNA
tttttaattttatttttaagatatatattttttgtttttattgtgatgtgtggatatattttgatttttgggtagttagtttgggggttggtttgaggttaattgaaatgtttttttttt

SEQ ID NO: 7515 - DNA, 120 bp, synthetic construct
  source 1..120: mol_type = other DNA
acctcctcaacttcatccctaaaatacatattctctactctcattataatatataaatatactctaaacaaccaatttaaaaattaatctaaaattaactaaaatattcttcctccaaaa

SEQ ID NO: 7516 - DNA, 120 bp, synthetic construct
  source 1..120: mol_type = other DNA
gtttttttaattttatttttaagatatatattttttgtttttattgtgatgtgtggatatattttgggtagttagtttgggggttggtttgaggttaattgaaatgttttttttttaagg

SEQ ID NO: 7517 - DNA, 120 bp, synthetic construct; identical to SEQ ID NO: 7513
  source 1..120: mol_type = other DNA

SEQ ID NO: 7518 - DNA, 120 bp, synthetic construct; identical to SEQ ID NO: 7514
  source 1..120: mol_type = other DNA

SEQ ID NO: 7519 - DNA, 120 bp, synthetic construct; identical to SEQ ID NO: 7515
  source 1..120: mol_type = other DNA

SEQ ID NO: 7520 - DNA, 120 bp, synthetic construct; identical to SEQ ID NO: 7516
  source 1..120: mol_type = other DNA

SEQ ID NO: 7521 - DNA, 120 bp, synthetic construct
  source 1..120: mol_type = other DNA
aatatatacaaaatcaaaataaaaaaaaaaaatataattctatttcttctacttctaaaacaaaaatctatacaataaaactattaaatttataaacaacaaataactttaccaaaataa

SEQ ID NO: 7522 - DNA, 120 bp, synthetic construct
  source 1..120: mol_type = other DNA
agtgtgtatagggttaaggtagggaggaagaatgtgattttattttttttgtttttgaagtaaggatttgtataatgaaattgttaggtttgtagataatagatgattttattaaaatag

SEQ ID NO: 7523 - DNA, 120 bp, synthetic construct
  source 1..120: mol_type = other DNA
atacaaaatcaaaataaaaaaaaaaaatataattctatttcttctacttctaaaacaaaaacttaaaaaaatctatacaataaaactattaaatttataaacaacaaataactttaccaa

SEQ ID NO: 7524 - DNA, 120 bp, synthetic construct
  source 1..120: mol_type = other DNA
gtatagggttaaggtagggaggaagaatgtgattttattttttttgtttttgaagtaaaaatttaaaaggatttgtataatgaaattgttaggtttgtagataatagatgattttattaa

SEQ ID NO: 7525 - DNA, 120 bp, synthetic construct; identical to SEQ ID NO: 7521
  source 1..120: mol_type = other DNA

SEQ ID NO: 7526 - DNA, 120 bp, synthetic construct; identical to SEQ ID NO: 7522
  source 1..120: mol_type = other DNA

SEQ ID NO: 7527 - DNA, 120 bp, synthetic construct; identical to SEQ ID NO: 7523
  source 1..120: mol_type = other DNA

SEQ ID NO: 7528 - DNA, 120 bp, synthetic construct; identical to SEQ ID NO: 7524
  source 1..120: mol_type = other DNA

SEQ ID NO: 7529 - DNA, 120 bp, synthetic construct
  source 1..120: mol_type = other DNA
acacctaaaaattaatattacttacataataaaaatttctatattatttaaaaatattttctaacttattcaattaaaataccatatcttaaccacttcacacaataataataaaatacc

SEQ ID NO: 7530 - DNA, 120 bp, synthetic construct
  source 1..120: mol_type = other DNA
atatttaaaaattaatattatttgtataatagaaatttttgtgttgtttaaaaatgttttttggtttgtttaattgagatgttgtgttttggttattttatgtggtgatgataaagtatt

SEQ ID NO: 7531 - DNA, 120 bp, synthetic construct
  source 1..120: mol_type = other DNA
ctaaaaattaatattacttacataataaaaatttctatattatttaaaaatattttctaatacttaacttattcaattaaaataccatatcttaaccacttcacacaataataataaaat

SEQ ID NO: 7532 - DNA, 120 bp, synthetic construct
  source 1..120: mol_type = other DNA
ttaaaaattaatattatttgtataatagaaatttttgtgttgtttaaaaatgttttttgatatttggtttgtttaattgagatgttgtgttttggttattttatgtggtgatgataaagt

SEQ ID NO: 7533 - DNA, 120 bp, synthetic construct
  source 1..120: mol_type = other DNA
acacctaaaaattaatattacttacataataaaaatttctatattatttaaaaatattttctaacttattcaattaaaataccgtatcttaaccacttcacgcgataataataaaatacc

SEQ ID NO: 7534 - DNA, 120 bp, synthetic construct
  source 1..120: mol_type = other DNA
atatttaaaaattaatattatttgtataatagaaatttttgtgttgtttaaaaatgttttttggtttgtttaattgagatgtcgtgttttggttattttacgcggtgatgataaagtatt

SEQ ID NO: 7535 - DNA, 120 bp, synthetic construct
  source 1..120: mol_type = other DNA
ctaaaaattaatattacttacataataaaaatttctatattatttaaaaatattttctaatacttaacttattcaattaaaataccgtatcttaaccacttcacgcgataataataaaat

SEQ ID NO: 7536 - DNA, 120 bp, synthetic construct
  source 1..120: mol_type = other DNA
ttaaaaattaatattatttgtataatagaaatttttgtgttgtttaaaaatgttttttgatatttggtttgtttaattgagatgtcgtgttttggttattttacgcggtgatgataaagt

SEQ ID NO: 7537 - DNA, 120 bp, synthetic construct
  source 1..120: mol_type = other DNA
aaatcattaattaaatattattttccaaaaacaaaaaaaaaaaatccacaattaacaatactaaaatatcaaaaaaacaattaattataaaaattaaatcatcaaaaatattcaaaataa

SEQ ID NO: 7538 - DNA, 120 bp, synthetic construct
  source 1..120: mol_type = other DNA
aggttattgattaagtgttgttttttagagatagaagagggaagtttataattaatagtattaaagtgttagagaaatagttaattatgaggattagattattaaaaatatttaaggtga

SEQ ID NO: 7539 - DNA, 120 bp, synthetic construct
  source 1..120: mol_type = other DNA
tataaaatcattaattaaatattattttccaaaaacaaaaaaaaaaaatccacaattaacatatcaaaaaaacaattaattataaaaattaaatcatcaaaaatattcaaaataacttta

SEQ ID NO: 7540 - DNA, 120 bp, synthetic construct
  source 1..120: mol_type = other DNA
tatgaggttattgattaagtgttgttttttagagatagaagagggaagtttataattaatatgttagagaaatagttaattatgaggattagattattaaaaatatttaaggtgatttta

SEQ ID NO: 7541 - DNA, 120 bp, synthetic construct; identical to SEQ ID NO: 7537
  source 1..120: mol_type = other DNA

SEQ ID NO: 7542 - DNA, 120 bp, synthetic construct; identical to SEQ ID NO: 7538
  source 1..120: mol_type = other DNA

SEQ ID NO: 7543 - DNA, 120 bp, synthetic construct; identical to SEQ ID NO: 7539
  source 1..120: mol_type = other DNA

SEQ ID NO: 7544 - DNA, 120 bp, synthetic construct; identical to SEQ ID NO: 7540
  source 1..120: mol_type = other DNA

SEQ ID NO: 7545 - DNA, 120 bp, synthetic construct
  source 1..120: mol_type = other DNA
cttactaaaaaaaatatctaaaaaattctataaaatataaactctaaaattcccaaaacaattttacaaaactataaaaataaaaatactactctaacttaataatccttataccaaaca

SEQ ID NO: 7546 - DNA, 120 bp, synthetic construct
  source 1..120: mol_type = other DNA
tttgttaggagagatgtttggggagttttgtgaaatatgggttttgaggtttttagagtagttttgtaaagttgtaggaatgaaagtgttgttttagtttagtggtttttgtgttaaata

SEQ ID NO: 7547 - DNA, 120 bp, synthetic construct
  source 1..120: mol_type = other DNA
taaacttactaaaaaaaatatctaaaaaattctataaaatataaactctaaaattcccaaaacaaaactataaaaataaaaatactactctaacttaataatccttataccaaacataat

SEQ ID NO: 7548 - DNA, 120 bp, synthetic construct
  source 1..120: mol_type = other DNA
tgagtttgttaggagagatgtttggggagttttgtgaaatatgggttttgaggtttttagagtaaagttgtaggaatgaaagtgttgttttagtttagtggtttttgtgttaaatatggt

SEQ ID NO: 7549 - DNA, 120 bp, synthetic construct; identical to SEQ ID NO: 7545
  source 1..120: mol_type = other DNA

SEQ ID NO: 7550 - DNA, 120 bp, synthetic construct; identical to SEQ ID NO: 7546
  source 1..120: mol_type = other DNA

SEQ ID NO: 7551 - DNA, 120 bp, synthetic construct; identical to SEQ ID NO: 7547
  source 1..120: mol_type = other DNA

SEQ ID NO: 7552 - DNA, 120 bp, synthetic construct; identical to SEQ ID NO: 7548
  source 1..120: mol_type = other DNA

SEQ ID NO: 7553 - DNA, 120 bp, synthetic construct
  source 1..120: mol_type = other DNA
aaaaataaactcctaaaaaaatcaaaaaaaactttctattaaaattaatcttaaaataaatcatataaacaaatatctacaaaaaattacattttaatctatttaaatatccttatttca

SEQ ID NO: 7554 - DNA, 120 bp, synthetic construct
  source 1..120: mol_type = other DNA
gagaatgagtttttgggggaattagagaaaattttttgttggggttgattttgaagtgagttatatgagtggatatttgtaaaaaattatattttagtttgtttaagtatttttatttta

SEQ ID NO: 7555 - DNA, 120 bp, synthetic construct
  source 1..120: mol_type = other DNA
aataaactcctaaaaaaatcaaaaaaaactttctattaaaattaatcttaaaataaatccctaacatataaacaaatatctacaaaaaattacattttaatctatttaaatatccttatt

SEQ ID NO: 7556 - DNA, 120 bp, synthetic construct
  source 1..120: mol_type = other DNA
aatgagtttttgggggaattagagaaaattttttgttggggttgattttgaagtgagtttttaatatatgagtggatatttgtaaaaaattatattttagtttgtttaagtatttttatt

SEQ ID NO: 7557 - DNA, 120 bp, synthetic construct
  source 1..120: mol_type = other DNA
aaaaataaactcctaaaaaaatcaaaaaaaactttctattaaaattaatcttaaaataaatcatataaacgaatatctacaaaaaattacattttaatctatttaaatatccttatttca

SEQ ID NO: 7558 - DNA, 120 bp, synthetic construct
  source 1..120: mol_type = other DNA
gagaatgagtttttgggggaattagagaaaattttttgttggggttgattttgaagtgagttatatgagcggatatttgtaaaaaattatattttagtttgtttaagtatttttatttta

SEQ ID NO: 7559 - DNA, 120 bp, synthetic construct
  source 1..120: mol_type = other DNA
aataaactcctaaaaaaatcaaaaaaaactttctattaaaattaatcttaaaataaatccctaacatataaacgaatatctacaaaaaattacattttaatctatttaaatatccttatt

SEQ ID NO: 7560 - DNA, 120 bp, synthetic construct
  source 1..120: mol_type = other DNA
aatgagtttttgggggaattagagaaaattttttgttggggttgattttgaagtgagtttttaatatatgagcggatatttgtaaaaaattatattttagtttgtttaagtatttttatt

SEQ ID NO: 7561 - DNA, 120 bp, synthetic construct
  source 1..120: mol_type = other DNA
atatatttataacaactataattcttattaaaatacaaattcaaactcaatactcatataaaacattcctacctaacctctaatatactaaacctcttacaacacaaaaaaaaactaaaa

SEQ ID NO: 7562 - DNA, 120 bp, synthetic construct
  source 1..120: mol_type = other DNA
gtgtatttgtaataattgtaatttttattaaaatgtagatttagatttagtatttatgtggagtatttttatttaatttttagtgtattgaattttttataatatagaagagggttaaaa

SEQ ID NO: 7563 - DNA, 120 bp, synthetic construct
  source 1..120: mol_type = other DNA
aatatatatttataacaactataattcttattaaaatacaaattcaaactcaatactcatattcctacctaacctctaatatactaaacctcttacaacacaaaaaaaaactaaaaaaaa

SEQ ID NO: 7564 - DNA, 120 bp, synthetic construct
  source 1..120: mol_type = other DNA
aatgtgtatttgtaataattgtaatttttattaaaatgtagatttagatttagtatttatgtttttatttaatttttagtgtattgaattttttataatatagaagagggttaaaaaaaa

SEQ ID NO: 7565 - DNA, 120 bp, synthetic construct; identical to SEQ ID NO: 7561
  source 1..120: mol_type = other DNA

SEQ ID NO: 7566 - DNA, 120 bp, synthetic construct; identical to SEQ ID NO: 7562
  source 1..120: mol_type = other DNA

SEQ ID NO: 7567 - DNA, 120 bp, synthetic construct; identical to SEQ ID NO: 7563
  source 1..120: mol_type = other DNA

SEQ ID NO: 7568 - DNA, 120 bp, synthetic construct; identical to SEQ ID NO: 7564
  source 1..120: mol_type = other DNA

SEQ ID NO: 7569 - DNA, 120 bp, synthetic construct
  source 1..120: mol_type = other DNA
aaaaaatactaacccctaaacaattcccataacaacctataaacaaactccaacaacaaaaaataaaaacaaaactcaaaaaccccaacaaaaaatactctataaataactaattcccat

SEQ ID NO: 7570 - DNA, 120 bp, synthetic construct
  source 1..120: mol_type = other DNA
gggaggtgttggtttttgggtagtttttatggtagtttgtgagtaggttttagtagtagggagtaagggtagagtttagggattttagtgaaggatgttttgtgagtggttggtttttat

SEQ ID NO: 7571 - DNA, 120 bp, synthetic construct
  source 1..120: mol_type = other DNA
taaaaaaaaatactaacccctaaacaattcccataacaacctataaacaaactccaacaacaaaacaaaactcaaaaaccccaacaaaaaatactctataaataactaattcccataaca

SEQ ID NO: 7572 - DNA, 120 bp, synthetic construct
  source 1..120: mol_type = other DNA
tggagggaggtgttggtttttgggtagtttttatggtagtttgtgagtaggttttagtagtagggtagagtttagggattttagtgaaggatgttttgtgagtggttggtttttatggta

SEQ ID NO: 7573 - DNA, 120 bp, synthetic construct
  source 1..120: mol_type = other DNA
aaaaaatactaacccctaaacaattcccataacaacctataaacaaactccaacaacaaaaaataaaaacaaaactcaaaaaccccaacgaaaaatactctataaataactaattcccat

SEQ ID NO: 7574 - DNA, 120 bp, synthetic construct
  source 1..120: mol_type = other DNA
gggaggtgttggtttttgggtagtttttatggtagtttgtgagtaggttttagtagtagggagtaagggtagagtttagggattttagcgaaggatgttttgtgagtggttggtttttat

SEQ ID NO: 7575 - DNA, 120 bp, synthetic construct
  source 1..120: mol_type = other DNA
taaaaaaaaatactaacccctaaacaattcccataacaacctataaacaaactccaacaacaaaacaaaactcaaaaaccccaacgaaaaatactctataaataactaattcccataaca

SEQ ID NO: 7576 - DNA, 120 bp, synthetic construct
  source 1..120: mol_type = other DNA
tggagggaggtgttggtttttgggtagtttttatggtagtttgtgagtaggttttagtagtagggtagagtttagggattttagcgaaggatgttttgtgagtggttggtttttatggta

SEQ ID NO: 7577 - DNA, 120 bp, synthetic construct
  source 1..120: mol_type = other DNA
taaactctcttttttcctttataatcaattactaataattatcccctttaaataaaacaaataccaaaaaataatatacatttaaatattttatttttcttaataaatattactttaaaa

SEQ ID NO: 7578 - DNA, 120 bp, synthetic construct
  source 1..120: mol_type = other DNA
taaattttttttttttttttgtggttagttgttagtagttgttttttttgggtgaaataaatattaggaggtaatatgtatttaaatgttttattttttttggtgaatattgttttagaa

SEQ ID NO: 7579 - DNA, 120 bp, synthetic construct
  source 1..120: mol_type = other DNA
ctctcttttttcctttataatcaattactaataattatcccctttaaataaaacaaatatcatttaccaaaaaataatatacatttaaatattttatttttcttaataaatattacttta

SEQ ID NO: 7580 - DNA, 120 bp, synthetic construct
  source 1..120: mol_type = other DNA
ttttttttttttttttgtggttagttgttagtagttgttttttttgggtgaaataaatattatttattaggaggtaatatgtatttaaatgttttattttttttggtgaatattgtttta

SEQ ID NO: 7581 - DNA, 120 bp, synthetic construct; identical to SEQ ID NO: 7577
  source 1..120: mol_type = other DNA

SEQ ID NO: 7582 - DNA, 120 bp, synthetic construct; identical to SEQ ID NO: 7578
  source 1..120: mol_type = other DNA

SEQ ID NO: 7583 - DNA, 120 bp, synthetic construct; identical to SEQ ID NO: 7579
  source 1..120: mol_type = other DNA

SEQ ID NO: 7584 - DNA, 120 bp, synthetic construct; identical to SEQ ID NO: 7580
  source 1..120: mol_type = other DNA

SEQ ID NO: 7585 - DNA, 120 bp, synthetic construct
  source 1..120: mol_type = other DNA
ctcaaataaaaaaaatcaatcataaactatcacaaatactcacaaaaaccaccccaaacaatatcccaatatacataactccaatcccaacaaataccacattaccttctaaaactaata

SEQ ID NO: 7586 - DNA, 120 bp, synthetic construct
  source 1..120: mol_type = other DNA
tttagatgaaagaagttggttatagattattgtaggtgtttatagggattattttaggtggtgttttaatgtgtatggttttgattttagtgggtgttatgttattttttgaaattgata

SEQ ID NO: 7587 - DNA, 120 bp, synthetic construct
  source 1..120: mol_type = other DNA
ctactcaaataaaaaaaatcaatcataaactatcacaaatactcacaaaaaccaccccaaaccaatatacataactccaatcccaacaaataccacattaccttctaaaactaataaaaa

SEQ ID NO: 7588 - DNA, 120 bp, synthetic construct
  source 1..120: mol_type = other DNA
ttgtttagatgaaagaagttggttatagattattgtaggtgtttatagggattattttaggttaatgtgtatggttttgattttagtgggtgttatgttattttttgaaattgataagga

SEQ ID NO: 7589 - DNA, 120 bp, synthetic construct
  source 1..120: mol_type = other DNA
ctcaaataaaaaaaatcgatcataaactatcgcaaatactcacaaaaaccaccccaaacgatatcccaatatacataactccgatcccaacgaataccacgttaccttctaaaactaata

SEQ ID NO: 7590 - DNA, 120 bp, synthetic construct
  source 1..120: mol_type = other DNA
tttagatgaaagaagtcggttatagattatcgtaggtgtttatagggattattttaggcggtgttttaatgtgtatggtttcgattttagcgggtgttacgttattttttgaaattgata

SEQ ID NO: 7591 - DNA, 120 bp, synthetic construct
  source 1..120: mol_type = other DNA
ctactcaaataaaaaaaatcgatcataaactatcgcaaatactcacaaaaaccaccccaaaccaatatacataactccgatcccaacgaataccacgttaccttctaaaactaataaaaa

SEQ ID NO: 7592 - DNA, 120 bp, synthetic construct
  source 1..120: mol_type = other DNA
ttgtttagatgaaagaagtcggttatagattatcgtaggtgtttatagggattattttaggttaatgtgtatggtttcgattttagcgggtgttacgttattttttgaaattgataagga

SEQ ID NO: 7593 - DNA, 120 bp, synthetic construct
  source 1..120: mol_type = other DNA
actaaaaactcaaccctaatatcacccaacactacccatcacataaaaaccataaaaacaaaaaacacatctacacacatcccaataccctaaacctccccaaaaccataaaaacaaaac

SEQ ID NO: 7594 - DNA, 120 bp, synthetic construct
  source 1..120: mol_type = other DNA
attaagagtttaattttgatgttgtttggtattgtttattatgtgagagttgtgagagtagagggtatgtttgtatatattttagtgttttgggtttttttggagttgtgagagtagagt

SEQ ID NO: 7595 - DNA, 120 bp, synthetic construct
  source 1..120: mol_type = other DNA
acaatactaaaaactcaaccctaatatcacccaacactacccatcacataaaaaccataaaacatctacacacatcccaataccctaaacctccccaaaaccataaaaacaaaacatatc

SEQ ID NO: 7596 - DNA, 120 bp, synthetic construct
  source 1..120: mol_type = other DNA
atagtattaagagtttaattttgatgttgtttggtattgtttattatgtgagagttgtgagatgtttgtatatattttagtgttttgggtttttttggagttgtgagagtagagtatgtt

SEQ ID NO: 7597 - DNA, 120 bp, synthetic construct
  source 1..120: mol_type = other DNA
actaaaaactcaaccctaatatcgcccgacactacccatcacgtaaaaaccgtaaaaacaaaaaacacgtctacacacatcccaataccctaaacctccccgaaaccgtaaaaacaaaac

SEQ ID NO: 7598 - DNA, 120 bp, synthetic construct
  source 1..120: mol_type = other DNA
attaagagtttaattttgatgtcgttcggtattgtttattacgtgagagtcgtgagagtagagggtacgtttgtatatattttagtgttttgggttttttcggagtcgtgagagtagagt

SEQ ID NO: 7599 - DNA, 120 bp, synthetic construct
  source 1..120: mol_type = other DNA
acaatactaaaaactcaaccctaatatcgcccgacactacccatcacgtaaaaaccgtaaaacgtctacacacatcccaataccctaaacctccccgaaaccgtaaaaacaaaacatatc

SEQ ID NO: 7600 - DNA, 120 bp, synthetic construct
  source 1..120: mol_type = other DNA
atagtattaagagtttaattttgatgtcgttcggtattgtttattacgtgagagtcgtgagacgtttgtatatattttagtgttttgggttttttcggagtcgtgagagtagagtatgtt

SEQ ID NO: 7601 - DNA, 120 bp, synthetic construct
  source 1..120: mol_type = other DNA
acatatatcttccctaaatctataaatatactttttcccaattcctccataaatataactactttatttctctaaaataaaaacttaccctacttcttctcaataccttaaatattttat

SEQ ID NO: 7602 - DNA, 120 bp, synthetic construct
  source 1..120: mol_type = other DNA
gtatgtgttttttttgagtttgtgagtgtgtttttttttaatttttttataaatatggttgttttatttttttaaaataaagatttattttgtttttttttaatgttttaggtgttttgt

SEQ ID NO: 7603 - DNA, 120 bp, synthetic construct
  source 1..120: mol_type = other DNA
tatcttccctaaatctataaatatactttttcccaattcctccataaatataactactttaaaaatctttatttctctaaaataaaaacttaccctacttcttctcaataccttaaatat

SEQ ID NO: 7604 - DNA, 120 bp, synthetic construct
  source 1..120: mol_type = other DNA
tgttttttttgagtttgtgagtgtgtttttttttaatttttttataaatatggttgttttgaaagtttttatttttttaaaataaagatttattttgtttttttttaatgttttaggtgt

SEQ ID NO: 7605 - DNA, 120 bp, synthetic construct; identical to SEQ ID NO: 7601
  source 1..120: mol_type = other DNA

SEQ ID NO: 7606 - DNA, 120 bp, synthetic construct; identical to SEQ ID NO: 7602
  source 1..120: mol_type = other DNA

SEQ ID NO: 7607 - DNA, 120 bp, synthetic construct; identical to SEQ ID NO: 7603
  source 1..120: mol_type = other DNA

SEQ ID NO: 7608 - DNA, 120 bp, synthetic construct; identical to SEQ ID NO: 7604
  source 1..120: mol_type = other DNA

SEQ ID NO: 7609 - DNA, 120 bp, synthetic construct
  source 1..120: mol_type = other DNA
acaataaatcactttttcttaattttattatatctcataaaaacattcaataccaaacatattaaaatatattaacaacaaaaataaatattaattacatcccaaaatatacacacttct

SEQ ID NO: 7610 - DNA, 120 bp, synthetic construct
  source 1..120: mol_type = other DNA
atagtgggttatttttttttgattttattgtgttttataaagatatttagtgttagatatattaaaatatattagtaataaagatgaatattaattatattttagaatatgtatattttt

SEQ ID NO: 7611 - DNA, 120 bp, synthetic construct
  source 1..120: mol_type = other DNA
ttttaacaataaatcactttttcttaattttattatatctcataaaaacattcaataccaaatatattaacaacaaaaataaatattaattacatcccaaaatatacacacttcttcttt

SEQ ID NO: 7612 - DNA, 120 bp, synthetic construct
  source 1..120: mol_type = other DNA
ttttgatagtgggttatttttttttgattttattgtgttttataaagatatttagtgttagatatattagtaataaagatgaatattaattatattttagaatatgtatatttttttttt

SEQ ID NO: 7613 - DNA, 120 bp, synthetic construct; identical to SEQ ID NO: 7609
  source 1..120: mol_type = other DNA

SEQ ID NO: 7614 - DNA, 120 bp, synthetic construct; identical to SEQ ID NO: 7610
  source 1..120: mol_type = other DNA

SEQ ID NO: 7615 - DNA, 120 bp, synthetic construct; identical to SEQ ID NO: 7611
  source 1..120: mol_type = other DNA

SEQ ID NO: 7616 - DNA, 120 bp, synthetic construct; identical to SEQ ID NO: 7612
  source 1..120: mol_type = other DNA

SEQ ID NO: 7617 - DNA, 120 bp, synthetic construct
  source 1..120: mol_type = other DNA
acaaaaacccccaaaaaaaaacctctccctttccatttaaccttaacctttacaaaaaaaaaatttaaaactaaaaatctataaactccacaaaacaaaactaaatctatcttactcatc

SEQ ID NO: 7618 - DNA, 120 bp, synthetic construct
  source 1..120: mol_type = other DNA
gtaaaggtttttagagaggagtttttttttttttatttagttttagtttttgtagaaggagagtttggagttgagggtttgtgaattttatagggtagggttgggtttgttttgtttgtt

SEQ ID NO: 7619 - DNA, 120 bp, synthetic construct
  source 1..120: mol_type = other DNA
aaaaacaaaaacccccaaaaaaaaacctctccctttccatttaaccttaacctttacaaaaaaaactaaaaatctataaactccacaaaacaaaactaaatctatcttactcatcaacac

SEQ ID NO: 7620 - DNA, 120 bp, synthetic construct
  source 1..120: mol_type = other DNA
aagagtaaaggtttttagagaggagtttttttttttttatttagttttagtttttgtagaaggagttgagggtttgtgaattttatagggtagggttgggtttgttttgtttgttaatat

SEQ ID NO: 7621 - DNA, 120 bp, synthetic construct
  source 1..120: mol_type = other DNA
acaaaaacccccaaaaaaaaacctctccctttccatttaaccttaacctttacaaaaaaaaaatttaaaactaaaaatctataaactccacaaaacaaaactaaatctatcttactcgtc

SEQ ID NO: 7622 - DNA, 120 bp, synthetic construct
  source 1..120: mol_type = other DNA
gtaaaggtttttagagaggagtttttttttttttatttagttttagtttttgtagaaggagagtttggagttgagggtttgtgaattttatagggtagggttgggtttgttttgttcgtt

SEQ ID NO: 7623 - DNA, 120 bp, synthetic construct
  source 1..120: mol_type = other DNA
aaaaacaaaaacccccaaaaaaaaacctctccctttccatttaaccttaacctttacaaaaaaaactaaaaatctataaactccacaaaacaaaactaaatctatcttactcgtcaacac

SEQ ID NO: 7624 - DNA, 120 bp, synthetic construct
  source 1..120: mol_type = other DNA
aagagtaaaggtttttagagaggagtttttttttttttatttagttttagtttttgtagaaggagttgagggtttgtgaattttatagggtagggttgggtttgttttgttcgttaatat

SEQ ID NO: 7625 - DNA, 120 bp, synthetic construct
  source 1..120: mol_type = other DNA
aatcctcataaaccaacatcccatattacttaatctccattcactcctttatttatttaatatacttactatataacaacactatcaaaaccacccaaaataccacaataaccaaaataa

SEQ ID NO: 7626 - DNA, 120 bp, synthetic construct
  source 1..120: mol_type = other DNA
agtttttatgagttagtattttatattgtttagtttttatttatttttttatttgtttgatgtgtttattatgtggtagtattgttaggattatttaggatgttatagtgattaagatag

SEQ ID NO: 7627 - DNA, 120 bp, synthetic construct
  source 1..120: mol_type = other DNA
tcataaaccaacatcccatattacttaatctccattcactcctttatttatttaataaatattaaatacttactatataacaacactatcaaaaccacccaaaataccacaataaccaaa

SEQ ID NO: 7628 - DNA, 120 bp, synthetic construct
  source 1..120: mol_type = other DNA
ttatgagttagtattttatattgtttagtttttatttatttttttatttgtttgatgagtattgagtgtttattatgtggtagtattgttaggattatttaggatgttatagtgattaag

SEQ ID NO: 7629 - DNA, 120 bp, synthetic construct; identical to SEQ ID NO: 7625
  source 1..120: mol_type = other DNA

SEQ ID NO: 7630 - DNA, 120 bp, synthetic construct; identical to SEQ ID NO: 7626
  source 1..120: mol_type = other DNA

SEQ ID NO: 7631 - DNA, 120 bp, synthetic construct; identical to SEQ ID NO: 7627
  source 1..120: mol_type = other DNA

SEQ ID NO: 7632 - DNA, 120 bp, synthetic construct; identical to SEQ ID NO: 7628
  source 1..120: mol_type = other DNA

SEQ ID NO: 7633 - DNA, 120 bp, synthetic construct
  source 1..120: mol_type = other DNA
aaaataaaacaaaaaactttaaattatataaaactttcacattatttcataaactctttcataaaataaaaaataattttaaacaaaaaaataataacatctaatatacatttcaaaata

SEQ ID NO: 7634 - DNA, 120 bp, synthetic construct
  source 1..120: mol_type = other DNA
ggagtgggataaggggttttggattatataaggtttttatattattttatggatttttttatgaaatgaggagtgattttgagtaaaagaataataatatttaatgtatattttaaaata

SEQ ID NO: 7635 - DNA, 120 bp, synthetic construct
  source 1..120: mol_type = other DNA
taaaacaaaaaactttaaattatataaaactttcacattatttcataaactctttcactcttaaataaaataaaaaataattttaaacaaaaaaataataacatctaatatacatttcaa

SEQ ID NO: 7636 - DNA, 120 bp, synthetic construct
  source 1..120: mol_type = other DNA
tgggataaggggttttggattatataaggtttttatattattttatggatttttttatttttaagtgaaatgaggagtgattttgagtaaaagaataataatatttaatgtatattttaa

SEQ ID NO: 7637 - DNA, 120 bp, synthetic construct; identical to SEQ ID NO: 7633
  source 1..120: mol_type = other DNA

SEQ ID NO: 7638 - DNA, 120 bp, synthetic construct; identical to SEQ ID NO: 7634
  source 1..120: mol_type = other DNA

SEQ ID NO: 7639 - DNA, 120 bp, synthetic construct; identical to SEQ ID NO: 7635
  source 1..120: mol_type = other DNA

SEQ ID NO: 7640 - DNA, 120 bp, synthetic construct; identical to SEQ ID NO: 7636
  source 1..120: mol_type = other DNA

SEQ ID NO: 7641 - DNA, 120 bp, synthetic construct
  source 1..120: mol_type = other DNA
ttttttaaaactttttttcctatttacctctaacaaaaattctaccttacaatacatacacacatatatacacaaaccaatattttactctaatcaaaaaatatatatatattaaaaaaa

SEQ ID NO: 7642 - DNA, 120 bp, synthetic construct
  source 1..120: mol_type = other DNA
ttttttaggatttttttttttatttgtttttaataagagttttattttatagtgtatatatatatgtatgtataagttaatattttgttttaattaaaaaatatatatatattgaaaagg

SEQ ID NO: 7643 - DNA, 120 bp, synthetic construct
  source 1..120: mol_type = other DNA
aaaaattttttaaaactttttttcctatttacctctaacaaaaattctaccttacaatacatatacacaaaccaatattttactctaatcaaaaaatatatatatattaaaaaaacccta

SEQ ID NO: 7644 - DNA, 120 bp, synthetic construct
  source 1..120: mol_type = other DNA
gaaaattttttaggatttttttttttatttgtttttaataagagttttattttatagtgtatatgtataagttaatattttgttttaattaaaaaatatatatatattgaaaaggttttg

SEQ ID NO: 7645 - DNA, 120 bp, synthetic construct; identical to SEQ ID NO: 7641
  source 1..120: mol_type = other DNA

SEQ ID NO: 7646 - DNA, 120 bp, synthetic construct; identical to SEQ ID NO: 7642
  source 1..120: mol_type = other DNA

SEQ ID NO: 7647 - DNA, 120 bp, synthetic construct; identical to SEQ ID NO: 7643
  source 1..120: mol_type = other DNA

SEQ ID NO: 7648 - DNA, 120 bp, synthetic construct; identical to SEQ ID NO: 7644
  source 1..120: mol_type = other DNA

SEQ ID NO: 7649 - DNA, 120 bp, synthetic construct
  source 1..120: mol_type = other DNA
taataatttaaattaaattttacttttcttaataacaaccaaataaccccaaataaatcttaaaataaaattaacaactcttaaaataatctttaaattaaaaacaaaatactatataaa

SEQ ID NO: 7650 - DNA, 120 bp, synthetic construct
  source 1..120: mol_type = other DNA
tagtagtttaggttaaattttattttttttaatgataattaaatggttttagatgggttttagggtggggttgatagtttttgaaatagtttttggattaagaataaaatgttgtgtgag

SEQ ID NO: 7651 - DNA, 120 bp, synthetic construct
  source 1..120: mol_type = other DNA
taatttaaattaaattttacttttcttaataacaaccaaataaccccaaataaatcttttcctcaaaataaaattaacaactcttaaaataatctttaaattaaaaacaaaatactatat

SEQ ID NO: 7652 - DNA, 120 bp, synthetic construct
  source 1..120: mol_type = other DNA
tagtttaggttaaattttattttttttaatgataattaaatggttttagatgggttttttttttagggtggggttgatagtttttgaaatagtttttggattaagaataaaatgttgtgt

SEQ ID NO: 7653 - DNA, 120 bp, synthetic construct; identical to SEQ ID NO: 7649
  source 1..120: mol_type = other DNA

SEQ ID NO: 7654 - DNA, 120 bp, synthetic construct; identical to SEQ ID NO: 7650
  source 1..120: mol_type = other DNA

SEQ ID NO: 7655 - DNA, 120 bp, synthetic construct; identical to SEQ ID NO: 7651
  source 1..120: mol_type = other DNA

SEQ ID NO: 7656 - DNA, 120 bp, synthetic construct; identical to SEQ ID NO: 7652
  source 1..120: mol_type = other DNA

SEQ ID NO: 7657 - DNA, 120 bp, synthetic construct
  source 1..120: mol_type = other DNA
aacccaaataaaaaaccaaccctaaaataaacccaaaatctacaaaaatacactaaacaccaccttaccccaaaaacccctcactactaccttaacatcaactcccaccaaacttctaaa

SEQ ID NO: 7658 - DNA, 120 bp, synthetic construct
  source 1..120: mol_type = other DNA
ggtttggatgaggggttagttttgaggtaaatttggggtttgtagaggtatattgggtattattttgttttagaggttttttattgttgttttggtattaatttttattaggtttttggg

SEQ ID NO: 7659 - DNA, 120 bp, synthetic construct
  source 1..120: mol_type = other DNA
ctacaaacccaaataaaaaaccaaccctaaaataaacccaaaatctacaaaaatacactaaaccccaaaaacccctcactactaccttaacatcaactcccaccaaacttctaaaacccc

SEQ ID NO: 7660 - DNA, 120 bp, synthetic construct
  source 1..120: mol_type = other DNA
ttgtaggtttggatgaggggttagttttgaggtaaatttggggtttgtagaggtatattgggttttagaggttttttattgttgttttggtattaatttttattaggtttttggggtttt

SEQ ID NO: 7661 - DNA, 120 bp, synthetic construct
  source 1..120: mol_type = other DNA
aacccgaataaaaaaccaaccctaaaataaacccgaaatctacaaaaatacactaaacaccaccttaccccaaaaacccctcactactaccttaacatcaactcccaccaaacttctaaa

SEQ ID NO: 7662 - DNA, 120 bp, synthetic construct
  source 1..120: mol_type = other DNA
ggttcggatgaggggttagttttgaggtaaattcggggtttgtagaggtatattgggtattattttgttttagaggttttttattgttgttttggtattaatttttattaggtttttggg

SEQ ID NO: 7663 - DNA, 120 bp, synthetic construct
  source 1..120: mol_type = other DNA
ctacaaacccgaataaaaaaccaaccctaaaataaacccgaaatctacaaaaatacactaaaccccaaaaacccctcactactaccttaacatcaactcccaccaaacttctaaaacccc

SEQ ID NO: 7664 - DNA, 120 bp, synthetic construct
  source 1..120: mol_type = other DNA
ttgtaggttcggatgaggggttagttttgaggtaaattcggggtttgtagaggtatattgggttttagaggttttttattgttgttttggtattaatttttattaggtttttggggtttt

SEQ ID NO: 7665 - DNA, 120 bp, synthetic construct
  source 1..120: mol_type = other DNA
acaacctccataattctacataatccacttatacatatatttcttaatctatcaatttcaaataaactccctaacataaaatattacacatttaatacacacttaaacatttctctataa

SEQ ID NO: 7666 - DNA, 120 bp, synthetic construct
  source 1..120: mol_type = other DNA
gtaatttttataattttatataatttatttgtatatatattttttgatttgttaattttaaatagattttttgatatagaatattatatatttgatatatatttaaatatttttttataa

SEQ ID NO: 7667 - DNA, 120 bp, synthetic construct
  source 1..120: mol_type = other DNA
ctccataattctacataatccacttatacatatatttcttaatctatcaatttcaaataatatttataaactccctaacataaaatattacacatttaatacacacttaaacatttctct

SEQ ID NO: 7668 - DNA, 120 bp, synthetic construct
  source 1..120: mol_type = other DNA
ttttataattttatataatttatttgtatatatattttttgatttgttaattttaaatggtatttatagattttttgatatagaatattatatatttgatatatatttaaatattttttt

SEQ ID NO: 7669 - DNA, 120 bp, synthetic construct; identical to SEQ ID NO: 7665
  source 1..120: mol_type = other DNA

SEQ ID NO: 7670 - DNA, 120 bp, synthetic construct; identical to SEQ ID NO: 7666
  source 1..120: mol_type = other DNA

SEQ ID NO: 7671 - DNA, 120 bp, synthetic construct; identical to SEQ ID NO: 7667
  source 1..120: mol_type = other DNA

SEQ ID NO: 7672 - DNA, 120 bp, synthetic construct; identical to SEQ ID NO: 7668
  source 1..120: mol_type = other DNA

SEQ ID NO: 7673 - DNA, 120 bp, synthetic construct
  source 1..120: mol_type = other DNA
tctaaaaattttaaaaaaaaaaaaaaaaaaaaattttaaaatctactacttacaatttcctcaaaataaacaaatcaaacatcataacaaaccaataacttcatacatatatatttaata

SEQ ID NO: 7674 - DNA, 120 bp, synthetic construct
  source 1..120: mol_type = other DNA
tttgggaattttaaagagaaaaggagagggagattttaaagtttgttgtttatagtttttttaagataagtaaattaggtattatagtagattagtaattttatatgtatatatttggtg

SEQ ID NO: 7675 - DNA, 120 bp, synthetic construct
  source 1..120: mol_type = other DNA
aaaattctaaaaattttaaaaaaaaaaaaaaaaaaaaattttaaaatctactacttacaattaaacaaatcaaacatcataacaaaccaataacttcatacatatatatttaataaccat

SEQ ID NO: 7676 - DNA, 120 bp, synthetic construct
  source 1..120: mol_type = other DNA
aaaattttgggaattttaaagagaaaaggagagggagattttaaagtttgttgtttatagttaagtaaattaggtattatagtagattagtaattttatatgtatatatttggtgattat

SEQ ID NO: 7677 - DNA, 120 bp, synthetic construct
  source 1..120: mol_type = other DNA
tctaaaaattttaaaaaaaaaaaaaaaaaaaaattttaaaatctactacttacaatttcctcaaaataaacaaatcaaacatcataacaaaccaataacttcatacgtatatatttaata

SEQ ID NO: 7678 - DNA, 120 bp, synthetic construct
  source 1..120: mol_type = other DNA
tttgggaattttaaagagaaaaggagagggagattttaaagtttgttgtttatagtttttttaagataagtaaattaggtattatagtagattagtaattttatacgtatatatttggtg

SEQ ID NO: 7679 - DNA, 120 bp, synthetic construct
  source 1..120: mol_type = other DNA
aaaattctaaaaattttaaaaaaaaaaaaaaaaaaaaattttaaaatctactacttacaattaaacaaatcaaacatcataacaaaccaataacttcatacgtatatatttaataaccat

SEQ ID NO: 7680 - DNA, 120 bp, synthetic construct
  source 1..120: mol_type = other DNA
aaaattttgggaattttaaagagaaaaggagagggagattttaaagtttgttgtttatagttaagtaaattaggtattatagtagattagtaattttatacgtatatatttggtgattat

SEQ ID NO: 7681 - DNA, 120 bp, synthetic construct
  source 1..120: mol_type = other DNA
ttttacataaattatttcttacatatacaaatatatctttaaaatatacacatatataaaatttaaaaatacatttaattaaaattttaacaaactttaccaatataatatttaaacatt

SEQ ID NO: 7682 - DNA, 120 bp, synthetic construct
  source 1..120: mol_type = other DNA
ttttatatagattattttttatatatgtaagtatatttttaggatatatatatatgtggaatttaagaatatgtttaattaaaattttggtaagttttgttagtgtgatatttgggtatt

SEQ ID NO: 7683 - DNA, 120 bp, synthetic construct
  source 1..120: mol_type = other DNA
acataaattatttcttacatatacaaatatatctttaaaatatacacatatataaaattattaaatttaaaaatacatttaattaaaattttaacaaactttaccaatataatatttaaa

SEQ ID NO: 7684 - DNA, 120 bp, synthetic construct
  source 1..120: mol_type = other DNA
atatagattattttttatatatgtaagtatatttttaggatatatatatatgtggaattgttgggtttaagaatatgtttaattaaaattttggtaagttttgttagtgtgatatttggg

SEQ ID NO: 7685 - DNA, 120 bp, synthetic construct
  source 1..120: mol_type = other DNA
ttttacataaattatttcttacatatacaaatatatctttaaaatatacacatatataaaatttaaaaatacgtttaattaaaattttaacaaactttaccaatataatatttaaacatt

SEQ ID NO: 7686 - DNA, 120 bp, synthetic construct
  source 1..120: mol_type = other DNA
ttttatatagattattttttatatatgtaagtatatttttaggatatatatatatgtggaatttaagaatacgtttaattaaaattttggtaagttttgttagtgtgatatttgggtatt

SEQ ID NO: 7687 - DNA, 120 bp, synthetic construct
  source 1..120: mol_type = other DNA
acataaattatttcttacatatacaaatatatctttaaaatatacacatatataaaattattaaatttaaaaatacgtttaattaaaattttaacaaactttaccaatataatatttaaa

SEQ ID NO: 7688 - DNA, 120 bp, synthetic construct
  source 1..120: mol_type = other DNA
atatagattattttttatatatgtaagtatatttttaggatatatatatatgtggaattgttgggtttaagaatacgtttaattaaaattttggtaagttttgttagtgtgatatttggg

SEQ ID NO: 7689 - DNA, 120 bp, synthetic construct
  source 1..120: mol_type = other DNA
taaattataccattattttaactcatcaccaaataaaaatctatatcaaatacataccactatatataaattaaaaacaaatataaaacaaaataaaaataaataccacctacatctaaa

SEQ ID NO: 7690 - DNA, 120 bp, synthetic construct
  source 1..120: mol_type = other DNA
taaattatgttattattttgatttattattaggtgaaagtttatgttaaatgtatgttattgtgtgtggattgagggtaggtgtagggtaggatgggggtgagtgttatttgtatttgaa

SEQ ID NO: 7691 - DNA, 120 bp, synthetic construct
  source 1..120: mol_type = other DNA
ttataccattattttaactcatcaccaaataaaaatctatatcaaatacataccactataccttaatatataaattaaaaacaaatataaaacaaaataaaaataaataccacctacatc

SEQ ID NO: 7692 - DNA, 120 bp, synthetic construct
  source 1..120: mol_type = other DNA
ttatgttattattttgatttattattaggtgaaagtttatgttaaatgtatgttattgtgttttagtgtgtggattgagggtaggtgtagggtaggatgggggtgagtgttatttgtatt

SEQ ID NO: 7693 - DNA, 120 bp, synthetic construct; identical to SEQ ID NO: 7689
  source 1..120: mol_type = other DNA

SEQ ID NO: 7694 - DNA, 120 bp, synthetic construct; identical to SEQ ID NO: 7690
  source 1..120: mol_type = other DNA

SEQ ID NO: 7695 - DNA, 120 bp, synthetic construct; identical to SEQ ID NO: 7691
  source 1..120: mol_type = other DNA

SEQ ID NO: 7696 - DNA, 120 bp, synthetic construct; identical to SEQ ID NO: 7692
  source 1..120: mol_type = other DNA

SEQ ID NO: 7697 - DNA, 120 bp, synthetic construct
  source 1..120: mol_type = other DNA
atatccacttattaaaaaaaaatcatctaaatatcaaataataaaaaaaatcctaaccaaaacatcacttacaataaaaccactatatctactaactcacataataatcattttcctaat

SEQ ID NO: 7698 - DNA, 120 bp, synthetic construct
  source 1..120: mol_type = other DNA
atgtttgtttgttaaaggggggttatttgggtgttaagtaataaaaaaaattttagttaaagtattatttataatggagttattgtatttgttgatttatatgatggttatttttttggt

SEQ ID NO: 7699 - DNA, 120 bp, synthetic construct
  source 1..120: mol_type = other DNA
catcatatccacttattaaaaaaaaatcatctaaatatcaaataataaaaaaaatcctaaccacttacaataaaaccactatatctactaactcacataataatcattttcctaatccct

SEQ ID NO: 7700 - DNA, 120 bp, synthetic construct
  source 1..120: mol_type = other DNA
tattatgtttgtttgttaaaggggggttatttgggtgttaagtaataaaaaaaattttagttatttataatggagttattgtatttgttgatttatatgatggttatttttttggttttt

SEQ ID NO: 7701 - DNA, 120 bp, synthetic construct
  source 1..120: mol_type = other DNA
atatccgcttattaaaaaaaaatcatctaaatatcaaataataaaaaaaatcctaaccaaaacatcacttacaataaaaccactatatctactaactcacataataatcattttcctaat

SEQ ID NO: 7702 - DNA, 120 bp, synthetic construct
  source 1..120: mol_type = other DNA
atgttcgtttgttaaaggggggttatttgggtgttaagtaataaaaaaaattttagttaaagtattatttataatggagttattgtatttgttgatttatatgatggttatttttttggt

SEQ ID NO: 7703 - DNA, 120 bp, synthetic construct
  source 1..120: mol_type = other DNA
catcatatccgcttattaaaaaaaaatcatctaaatatcaaataataaaaaaaatcctaaccacttacaataaaaccactatatctactaactcacataataatcattttcctaatccct

SEQ ID NO: 7704 - DNA, 120 bp, synthetic construct
  source 1..120: mol_type = other DNA
tattatgttcgtttgttaaaggggggttatttgggtgttaagtaataaaaaaaattttagttatttataatggagttattgtatttgttgatttatatgatggttatttttttggttttt

SEQ ID NO: 7705 - DNA, 120 bp, synthetic construct
  source 1..120: mol_type = other DNA
aaacatatatttttcaatattcaataacaataaatacaatactatattttaactcatcctcttaaatcataaaaaattccttttatccctaaaaaacaaataacactaaccttaaatatt

SEQ ID NO: 7706 - DNA, 120 bp, synthetic construct
  source 1..120: mol_type = other DNA
agatatatattttttaatgtttagtaataataaatgtagtgttatgttttaatttatttttttaagttatggggaattttttttatttttagaaaatagatgatattgattttaaatgtt

SEQ ID NO: 7707 - DNA, 120 bp, synthetic construct
  source 1..120: mol_type = other DNA
tcccaaaacatatatttttcaatattcaataacaataaatacaatactatattttaactcatcataaaaaattccttttatccctaaaaaacaaataacactaaccttaaatatttaata

SEQ ID NO: 7708 - DNA, 120 bp, synthetic construct
  source 1..120: mol_type = other DNA
ttttaagatatatattttttaatgtttagtaataataaatgtagtgttatgttttaatttattatggggaattttttttatttttagaaaatagatgatattgattttaaatgtttggta

SEQ ID NO: 7709 - DNA, 120 bp, synthetic construct; identical to SEQ ID NO: 7705
  source 1..120: mol_type = other DNA

SEQ ID NO: 7710 - DNA, 120 bp, synthetic construct; identical to SEQ ID NO: 7706
  source 1..120: mol_type = other DNA

SEQ ID NO: 7711 - DNA, 120 bp, synthetic construct; identical to SEQ ID NO: 7707
  source 1..120: mol_type = other DNA

SEQ ID NO: 7712 - DNA, 120 bp, synthetic construct; identical to SEQ ID NO: 7708
  source 1..120: mol_type = other DNA

SEQ ID NO: 7713 - DNA, 120 bp, synthetic construct
  source 1..120: mol_type = other DNA
ctaattccaaaatccctttatcattaaaaaaattaaaacccaccccacaaaacaaaaaaattcatactaaaactaaaaacatacttctattaaaaaatttaaaaacatacataaactata

SEQ ID NO: 7714 - DNA, 120 bp, synthetic construct
  source 1..120: mol_type = other DNA
ttaattttagggtttttttattattgggagggttagaatttattttatagagtagagaggtttatgttggaattgaagatatgtttttgttaggagatttaaggatatatatgaattatg

SEQ ID NO: 7715 - DNA, 120 bp, synthetic construct
  source 1..120: mol_type = other DNA
ttccaaaatccctttatcattaaaaaaattaaaacccaccccacaaaacaaaaaaattcaaaatatcatactaaaactaaaaacatacttctattaaaaaatttaaaaacatacataaac

SEQ ID NO: 7716 - DNA, 120 bp, synthetic construct
  source 1..120: mol_type = other DNA
ttttagggtttttttattattgggagggttagaatttattttatagagtagagaggtttagaatgttatgttggaattgaagatatgtttttgttaggagatttaaggatatatatgaat

SEQ ID NO: 7717 - DNA, 120 bp, synthetic construct; identical to SEQ ID NO: 7713
  source 1..120: mol_type = other DNA

SEQ ID NO: 7718 - DNA, 120 bp, synthetic construct; identical to SEQ ID NO: 7714
  source 1..120: mol_type = other DNA

SEQ ID NO: 7719 - DNA, 120 bp, synthetic construct; identical to SEQ ID NO: 7715
  source 1..120: mol_type = other DNA

SEQ ID NO: 7720 - DNA, 120 bp, synthetic construct; identical to SEQ ID NO: 7716
  source 1..120: mol_type = other DNA

SEQ ID NO: 7721 - DNA, 120 bp, synthetic construct
  source 1..120: mol_type = other DNA
cccaaaccataaataactataccaatcaataacaaaatatacttactaacataaacaaatatccctaacattccataaaaccaaacttcaaaacatcacctaccatataaacccaaaaca

SEQ ID NO: 7722 - DNA, 120 bp, synthetic construct
  source 1..120: mol_type = other DNA
tttaaattatgagtggttgtgttagttagtagtaaggtgtgtttgttgatatagatagatgtttttggtattttataaaattaggttttagaatattatttgttatatgagtttaaaata

SEQ ID NO: 7723 - DNA, 120 bp, synthetic construct
  source 1..120: mol_type = other DNA
aatacccaaaccataaataactataccaatcaataacaaaatatacttactaacataaacaaacattccataaaaccaaacttcaaaacatcacctaccatataaacccaaaacaaacat

SEQ ID NO: 7724 - DNA, 120 bp, synthetic construct
  source 1..120: mol_type = other DNA
ggtatttaaattatgagtggttgtgttagttagtagtaaggtgtgtttgttgatatagataggtattttataaaattaggttttagaatattatttgttatatgagtttaaaataaatat

SEQ ID NO: 7725 - DNA, 120 bp, synthetic construct; identical to SEQ ID NO: 7721
  source 1..120: mol_type = other DNA

SEQ ID NO: 7726 - DNA, 120 bp, synthetic construct; identical to SEQ ID NO: 7722
  source 1..120: mol_type = other DNA

SEQ ID NO: 7727 - DNA, 120 bp, synthetic construct; identical to SEQ ID NO: 7723
  source 1..120: mol_type = other DNA

SEQ ID NO: 7728 - DNA, 120 bp, synthetic construct; identical to SEQ ID NO: 7724
  source 1..120: mol_type = other DNA

SEQ ID NO: 7729 - DNA, 120 bp, synthetic construct
  source 1..120: mol_type = other DNA
aatcaattatatttctttataaaaccaataaattatcaaaaattaaaattttttaaaacaatatttacaataactaaatataaaatacttaaaaataaacttttactaaaatttacaaaa

SEQ ID NO: 7730 - DNA, 120 bp, synthetic construct
  source 1..120: mol_type = other DNA
aattaattgtatttttttataaggttaataaattattagaagttggaattttttaaaatagtgtttataatagttaaatatgaaatatttaggaataaatttttattaaagtttatagaa

SEQ ID NO: 7731 - DNA, 120 bp, synthetic construct
  source 1..120: mol_type = other DNA
aaaaaatcaattatatttctttataaaaccaataaattatcaaaaattaaaattttttaaaacaataactaaatataaaatacttaaaaataaacttttactaaaatttacaaaaactat

SEQ ID NO: 7732 - DNA, 120 bp, synthetic construct
  source 1..120: mol_type = other DNA
aaaaaattaattgtatttttttataaggttaataaattattagaagttggaattttttaaaataatagttaaatatgaaatatttaggaataaatttttattaaagtttatagaaattgt

SEQ ID NO: 7733 - DNA, 120 bp, synthetic construct; identical to SEQ ID NO: 7729
  source 1..120: mol_type = other DNA

SEQ ID NO: 7734 - DNA, 120 bp, synthetic construct; identical to SEQ ID NO: 7730
  source 1..120: mol_type = other DNA

SEQ ID NO: 7735 - DNA, 120 bp, synthetic construct; identical to SEQ ID NO: 7731
  source 1..120: mol_type = other DNA

SEQ ID NO: 7736 - DNA, 120 bp, synthetic construct; identical to SEQ ID NO: 7732
  source 1..120: mol_type = other DNA

SEQ ID NO: 7737 - DNA, 120 bp, synthetic construct
  source 1..120: mol_type = other DNA
taaataacaaatattcaaaaaaatccaaatttataaatacctaatattccctatccactataattactaacataattttaattaattaattctctataaaaactttaaaaaaaactttat

SEQ ID NO: 7738 - DNA, 120 bp, synthetic construct
  source 1..120: mol_type = other DNA
taaatagtaaatatttagaagggtttagatttgtggatatttgatattttttgtttattatagttgttaatatggttttaattagttaattttttgtgagaattttagaaagggttttgt

SEQ ID NO: 7739 - DNA, 120 bp, synthetic construct
  source 1..120: mol_type = other DNA
taacaaatattcaaaaaaatccaaatttataaatacctaatattccctatccactataactataaaattactaacataattttaattaattaattctctataaaaactttaaaaaaaact

SEQ ID NO: 7740 - DNA, 120 bp, synthetic construct
  source 1..120: mol_type = other DNA
tagtaaatatttagaagggtttagatttgtggatatttgatattttttgtttattatagttataaagttgttaatatggttttaattagttaattttttgtgagaattttagaaagggtt

SEQ ID NO: 7741 - DNA, 120 bp, synthetic construct; identical to SEQ ID NO: 7737
  source 1..120: mol_type = other DNA

SEQ ID NO: 7742 - DNA, 120 bp, synthetic construct; identical to SEQ ID NO: 7738
  source 1..120: mol_type = other DNA

SEQ ID NO: 7743 - DNA, 120 bp, synthetic construct; identical to SEQ ID NO: 7739
  source 1..120: mol_type = other DNA

SEQ ID NO: 7744 - DNA, 120 bp, synthetic construct; identical to SEQ ID NO: 7740
  source 1..120: mol_type = other DNA

SEQ ID NO: 7745 - DNA, 120 bp, synthetic construct
  source 1..120: mol_type = other DNA
tcacctataccaacctaaaaaaaactccaaacataacattcccacctactcaaaattaaaactaaactatactctcaacctctaaaccaaataacccaaaccaaaatatccataacctta

SEQ ID NO: 7746 - DNA, 120 bp, synthetic construct
  source 1..120: mol_type = other DNA
ttatttgtgttaatttgaggagggttttgagtgtggtatttttatttatttaggattggggttgagttgtgtttttggtttttggattaggtggtttagattaaggtgtttatgattttg

SEQ ID NO: 7747 - DNA, 120 bp, synthetic construct
  source 1..120: mol_type = other DNA
aaaatcacctataccaacctaaaaaaaactccaaacataacattcccacctactcaaaattactatactctcaacctctaaaccaaataacccaaaccaaaatatccataaccttatcaa

SEQ ID NO: 7748 - DNA, 120 bp, synthetic construct
  source 1..120: mol_type = other DNA
ggggttatttgtgttaatttgaggagggttttgagtgtggtatttttatttatttaggattgttgtgtttttggtttttggattaggtggtttagattaaggtgtttatgattttgttag

SEQ ID NO: 7749 - DNA, 120 bp, synthetic construct
  source 1..120: mol_type = other DNA
tcacctataccaacctaaaaaaaactccgaacgtaacattcccacctactcaaaattaaaactaaactatactctcgacctctaaaccaaataacccaaaccaaaatatccataacctta

SEQ ID NO: 7750 - DNA, 120 bp, synthetic construct
  source 1..120: mol_type = other DNA
ttatttgtgttaatttgaggagggtttcgagcgtggtatttttatttatttaggattggggttgagttgtgttttcggtttttggattaggtggtttagattaaggtgtttatgattttg

SEQ ID NO: 7751 - DNA, 120 bp, synthetic construct
  source 1..120: mol_type = other DNA
aaaatcacctataccaacctaaaaaaaactccgaacgtaacattcccacctactcaaaattactatactctcgacctctaaaccaaataacccaaaccaaaatatccataaccttatcaa

SEQ ID NO: 7752 - DNA, 120 bp, synthetic construct
  source 1..120: mol_type = other DNA
ggggttatttgtgttaatttgaggagggtttcgagcgtggtatttttatttatttaggattgttgtgttttcggtttttggattaggtggtttagattaaggtgtttatgattttgttag

SEQ ID NO: 7753 - DNA, 120 bp, synthetic construct
  source 1..120: mol_type = other DNA
taatcttaataaccacctataataaactaaattatatctccccaaaatttatatttttatacatcaaaatataactattattaaacataaaatctttaaaaaaataaccaaattcaaata

SEQ ID NO: 7754 - DNA, 120 bp, synthetic construct
  source 1..120: mol_type = other DNA
tagttttaatgattatttgtgatgaattgaattgtgtttttttaaaatttgtatttttatgtattagaatgtaattgttgttggatatagggtttttaaagaggtgattaaatttaaatg

SEQ ID NO: 7755 - DNA, 120 bp, synthetic construct
  source 1..120: mol_type = other DNA
cttaataaccacctataataaactaaattatatctccccaaaatttatatttttatatcctaacacatcaaaatataactattattaaacataaaatctttaaaaaaataaccaaattca

SEQ ID NO: 7756 - DNA, 120 bp, synthetic construct
  source 1..120: mol_type = other DNA
tttaatgattatttgtgatgaattgaattgtgtttttttaaaatttgtatttttatgttttagtatattagaatgtaattgttgttggatatagggtttttaaagaggtgattaaattta

SEQ ID NO: 7757 - DNA, 120 bp, synthetic construct; identical to SEQ ID NO: 7753
  source 1..120: mol_type = other DNA

SEQ ID NO: 7758 - DNA, 120 bp, synthetic construct; identical to SEQ ID NO: 7754
  source 1..120: mol_type = other DNA

SEQ ID NO: 7759 - DNA, 120 bp, synthetic construct; identical to SEQ ID NO: 7755
  source 1..120: mol_type = other DNA

SEQ ID NO: 7760 - DNA, 120 bp, synthetic construct; identical to SEQ ID NO: 7756
  source 1..120: mol_type = other DNA

SEQ ID NO: 7761 - DNA, 120 bp, synthetic construct
  source 1..120: mol_type = other DNA
accacatacataaaaaccataataaaaaaaaacccaatataaaaaaaaaactactaactcaaaacccacttccaatctaccctccataccttcttccctctccctaaaaaaaccaaccta

SEQ ID NO: 7762 - DNA, 120 bp, synthetic construct
  source 1..120: mol_type = other DNA
gttatgtatgtaagggttatggtggggaagggtttagtgtggaggaagggttattggtttagagtttatttttagtttgttttttatgtttttttttttttttttagaaaagttagtttg

SEQ ID NO: 7763 - DNA, 120 bp, synthetic construct
  source 1..120: mol_type = other DNA
ccataccacatacataaaaaccataataaaaaaaaacccaatataaaaaaaaaactactaaccacttccaatctaccctccataccttcttccctctccctaaaaaaaccaacctaaact

SEQ ID NO: 7764 - DNA, 120 bp, synthetic construct
  source 1..120: mol_type = other DNA
ttgtgttatgtatgtaagggttatggtggggaagggtttagtgtggaggaagggttattggttatttttagtttgttttttatgtttttttttttttttttagaaaagttagtttgggtt

SEQ ID NO: 7765 - DNA, 120 bp, synthetic construct
  source 1..120: mol_type = other DNA
accacgtacgtaaaaaccataataaaaaaaaacccaatataaaaaaaaaactactaactcaaaacccacttccaatctaccctccataccttcttccctctccctaaaaaaaccaaccta

SEQ ID NO: 7766 - DNA, 120 bp, synthetic construct
  source 1..120: mol_type = other DNA
gttacgtacgtaagggttatggtggggaagggtttagtgtggaggaagggttattggtttagagtttatttttagtttgttttttatgtttttttttttttttttagaaaagttagtttg

SEQ ID NO: 7767 - DNA, 120 bp, synthetic construct
  source 1..120: mol_type = other DNA
ccgtaccacgtacgtaaaaaccataataaaaaaaaacccaatataaaaaaaaaactactaaccacttccaatctaccctccataccttcttccctctccctaaaaaaaccaacctaaact

SEQ ID NO: 7768 - DNA, 120 bp, synthetic construct
  source 1..120: mol_type = other DNA
tcgtgttacgtacgtaagggttatggtggggaagggtttagtgtggaggaagggttattggttatttttagtttgttttttatgtttttttttttttttttagaaaagttagtttgggtt

SEQ ID NO: 7769 - DNA, 120 bp, synthetic construct
  source 1..120: mol_type = other DNA
aatttaaaaaaataatataaaccaactattacaaataaaatttaaaaaactatacatataacttaaaactcatcatttcatttaatattcaattttattctaaaacaaaaaatcaattct

SEQ ID NO: 7770 - DNA, 120 bp, synthetic construct
  source 1..120: mol_type = other DNA
agtttgaaagaataatgtaggttaattattgtaaatgagatttggaggattgtgtatgtggtttgggatttattattttatttggtatttagttttgttttgaggtagaaaattaatttt

SEQ ID NO: 7771 - DNA, 120 bp, synthetic construct
  source 1..120: mol_type = other DNA
taaaaaaataatataaaccaactattacaaataaaatttaaaaaactatacatataacctactaacttaaaactcatcatttcatttaatattcaattttattctaaaacaaaaaatcaa

SEQ ID NO: 7772 - DNA, 120 bp, synthetic construct
  source 1..120: mol_type = other DNA
tgaaagaataatgtaggttaattattgtaaatgagatttggaggattgtgtatgtggtttattgatttgggatttattattttatttggtatttagttttgttttgaggtagaaaattaa

SEQ ID NO: 7773 - DNA, 120 bp, synthetic construct; identical to SEQ ID NO: 7769
  source 1..120: mol_type = other DNA

SEQ ID NO: 7774 - DNA, 120 bp, synthetic construct; identical to SEQ ID NO: 7770
  source 1..120: mol_type = other DNA

SEQ ID NO: 7775 - DNA, 120 bp, synthetic construct; identical to SEQ ID NO: 7771
  source 1..120: mol_type = other DNA

SEQ ID NO: 7776 - DNA, 120 bp, synthetic construct; identical to SEQ ID NO: 7772
  source 1..120: mol_type = other DNA

SEQ ID NO: 7777 - DNA, 120 bp, synthetic construct
  source 1..120: mol_type = other DNA
aataaatcctacaaaatttcaaaaacctaccattttcttaaaatttttaaaattctaataataccaaaatatccattccataacaaaaaaatacttacaacatcttacattccttaccac

SEQ ID NO: 7778 - DNA, 120 bp, synthetic construct
  source 1..120: mol_type = other DNA
gataaattttataaagttttagagatttgttatttttttaaaatttttaaggttttggtggtgttaaaatatttattttatagtaaaagaatatttgtagtattttgtattttttattat

SEQ ID NO: 7779 - DNA, 120 bp, synthetic construct
  source 1..120: mol_type = other DNA
atcctacaaaatttcaaaaacctaccattttcttaaaatttttaaaattctaataatcaaaaacataccaaaatatccattccataacaaaaaaatacttacaacatcttacattcctta

SEQ ID NO: 7780 - DNA, 120 bp, synthetic construct
  source 1..120: mol_type = other DNA
attttataaagttttagagatttgttatttttttaaaatttttaaggttttggtggttagggatatgttaaaatatttattttatagtaaaagaatatttgtagtattttgtatttttta

SEQ ID NO: 7781 - DNA, 120 bp, synthetic construct; identical to SEQ ID NO: 7777
  source 1..120: mol_type = other DNA

SEQ ID NO: 7782 - DNA, 120 bp, synthetic construct; identical to SEQ ID NO: 7778
  source 1..120: mol_type = other DNA

SEQ ID NO: 7783 - DNA, 120 bp, synthetic construct; identical to SEQ ID NO: 7779
  source 1..120: mol_type = other DNA

SEQ ID NO: 7784 - DNA, 120 bp, synthetic construct; identical to SEQ ID NO: 7780
  source 1..120: mol_type = other DNA

SEQ ID NO: 7785 - DNA, 120 bp, synthetic construct
  source 1..120: mol_type = other DNA
aaatattaataaaattatttttactaaaaaaatcataaatatattacaaaaaaaatttaaatctctttctataaaatatataatacaacacaacaaaccataaattaaatattactttat

SEQ ID NO: 7786 - DNA, 120 bp, synthetic construct
  source 1..120: mol_type = other DNA
gaatattagtaaagttatttttattgggaagattataaatatattataaaaaaggtttgagtttttttttgtgggatatatgatgtaatataataagttgtggattgggtgttgttttgt

SEQ ID NO: 7787 - DNA, 120 bp, synthetic construct
  source 1..120: mol_type = other DNA
actaaatattaataaaattatttttactaaaaaaatcataaatatattacaaaaaaaattttttctataaaatatataatacaacacaacaaaccataaattaaatattactttataaaa

SEQ ID NO: 7788 - DNA, 120 bp, synthetic construct
  source 1..120: mol_type = other DNA
attgaatattagtaaagttatttttattgggaagattataaatatattataaaaaaggttttttttgtgggatatatgatgtaatataataagttgtggattgggtgttgttttgtaagg

SEQ ID NO: 7789 - DNA, 120 bp, synthetic construct
  source 1..120: mol_type = other DNA
aaatattaataaaattatttttactaaaaaaatcataaatatattacaaaaaaaatttaaatctctttctataaaatatataatacaacacaacaaaccgtaaattaaatattactttat

SEQ ID NO: 7790 - DNA, 120 bp, synthetic construct
  source 1..120: mol_type = other DNA
gaatattagtaaagttatttttattgggaagattataaatatattataaaaaaggtttgagtttttttttgtgggatatatgatgtaatataataagtcgtggattgggtgttgttttgt

SEQ ID NO: 7791 - DNA, 120 bp, synthetic construct
  source 1..120: mol_type = other DNA
actaaatattaataaaattatttttactaaaaaaatcataaatatattacaaaaaaaattttttctataaaatatataatacaacacaacaaaccgtaaattaaatattactttataaaa

SEQ ID NO: 7792 - DNA, 120 bp, synthetic construct
  source 1..120: mol_type = other DNA
attgaatattagtaaagttatttttattgggaagattataaatatattataaaaaaggttttttttgtgggatatatgatgtaatataataagtcgtggattgggtgttgttttgtaagg

SEQ ID NO: 7793 - DNA, 120 bp, synthetic construct
  source 1..120: mol_type = other DNA
ttcatttctaaaaataacttacacataatatcttaaaatattctctacaatatttatttacaatacatttacctctctataatataataacaatatcaatacttacctaaaaaaactatt

SEQ ID NO: 7794 - DNA, 120 bp, synthetic construct
  source 1..120: mol_type = other DNA
tttgtttttaaagatgatttgtatgtaatgttttaaaatgttttttgtagtgtttgtttgtaatatatttatttttttgtggtatggtggtaatattagtatttatttagaagggttgtt

SEQ ID NO: 7795 - DNA, 120 bp, synthetic construct
  source 1..120: mol_type = other DNA
taaacttcatttctaaaaataacttacacataatatcttaaaatattctctacaatatttaatttacctctctataatataataacaatatcaatacttacctaaaaaaactattataaa

SEQ ID NO: 7796 - DNA, 120 bp, synthetic construct
  source 1..120: mol_type = other DNA
taaattttgtttttaaagatgatttgtatgtaatgttttaaaatgttttttgtagtgtttgatttatttttttgtggtatggtggtaatattagtatttatttagaagggttgttgtgag

SEQ ID NO: 7797 - DNA, 120 bp, synthetic construct
  source 1..120: mol_type = other DNA
ttcgtttctaaaaataacttacacgtaatatcttaaaatattctctacaatatttatttacaatacatttacctctctataatataataacaatatcaatacttacctaaaaaaactatt

SEQ ID NO: 7798 - DNA, 120 bp, synthetic construct
  source 1..120: mol_type = other DNA
ttcgtttttaaagatgatttgtacgtaatgttttaaaatgttttttgtagtgtttgtttgtaatatatttatttttttgtggtatggtggtaatattagtatttatttagaagggttgtt

SEQ ID NO: 7799 - DNA, 120 bp, synthetic construct
  source 1..120: mol_type = other DNA
taaacttcgtttctaaaaataacttacacgtaatatcttaaaatattctctacaatatttaatttacctctctataatataataacaatatcaatacttacctaaaaaaactattataaa

SEQ ID NO: 7800 - DNA, 120 bp, synthetic construct
  source 1..120: mol_type = other DNA
taaatttcgtttttaaagatgatttgtacgtaatgttttaaaatgttttttgtagtgtttgatttatttttttgtggtatggtggtaatattagtatttatttagaagggttgttgtgag

SEQ ID NO: 7801 - DNA, 120 bp, synthetic construct
  source 1..120: mol_type = other DNA
caatatctataaacaaaaacaacccaaaatttaaatccttaaatccccccttaacaataaccctactatccttctataaacacaatacacctaccacaaacctaaaaaaaaaataaccaa

SEQ ID NO: 7802 - DNA, 120 bp, synthetic construct
  source 1..120: mol_type = other DNA
tagtgtttataaatagggataatttaaggtttgggtttttgggtttttttttggtagtgattttgttgtttttttgtggatatagtatatttgttataggtttggagagaaggtggttag

SEQ ID NO: 7803 - DNA, 120 bp, synthetic construct
  source 1..120: mol_type = other DNA
tctataaacaaaaacaacccaaaatttaaatccttaaatccccccttaacaataaccctacccctacctactatccttctataaacacaatacacctaccacaaacctaaaaaaaaaata

SEQ ID NO: 7804 - DNA, 120 bp, synthetic construct
  source 1..120: mol_type = other DNA
tttataaatagggataatttaaggtttgggtttttgggtttttttttggtagtgattttgtttttgtttgttgtttttttgtggatatagtatatttgttataggtttggagagaaggtg

SEQ ID NO: 7805 - DNA, 120 bp, synthetic construct; identical to SEQ ID NO: 7801
  source 1..120: mol_type = other DNA

SEQ ID NO: 7806 - DNA, 120 bp, synthetic construct; identical to SEQ ID NO: 7802
  source 1..120: mol_type = other DNA

SEQ ID NO: 7807 - DNA, 120 bp, synthetic construct; identical to SEQ ID NO: 7803
  source 1..120: mol_type = other DNA

SEQ ID NO: 7808 - DNA, 120 bp, synthetic construct; identical to SEQ ID NO: 7804
  source 1..120: mol_type = other DNA

SEQ ID NO: 7809 - DNA, 120 bp, synthetic construct
  source 1..120: mol_type = other DNA
aaacttaaaaaccatataacccccaaacctaataaacctaaaactcaaccccacaaaaactcatctaactaaaattaaaacctttaaaacaaacaaaaaatcccctctacaaacaaactt

SEQ ID NO: 7810 - DNA, 120 bp, synthetic construct
  source 1..120: mol_type = other DNA
gagtttaggagttgtgtggtttttaggtttggtgggtttgggatttagttttatgggagtttatttagttggggttgaggtttttggggtaagtaaggagttttttttgtaggtaggttt

SEQ ID NO: 7811 - DNA, 120 bp, synthetic construct
  source 1..120: mol_type = other DNA
aaataaacttaaaaaccatataacccccaaacctaataaacctaaaactcaaccccacaaaaactaaaattaaaacctttaaaacaaacaaaaaatcccctctacaaacaaacttcccta

SEQ ID NO: 7812 - DNA, 120 bp, synthetic construct
  source 1..120: mol_type = other DNA
ggatgagtttaggagttgtgtggtttttaggtttggtgggtttgggatttagttttatgggagttggggttgaggtttttggggtaagtaaggagttttttttgtaggtaggtttttttg

SEQ ID NO: 7813 - DNA, 120 bp, synthetic construct
  source 1..120: mol_type = other DNA
aaacttaaaaaccgtataacccccaaacctaataaacctaaaactcaaccccacgaaaactcatctaactaaaattaaaacctttaaaacaaacaaaaaatcccctctacaaacaaactt

SEQ ID NO: 7814 - DNA, 120 bp, synthetic construct
  source 1..120: mol_type = other DNA
gagtttaggagtcgtgtggtttttaggtttggtgggtttgggatttagttttacgggagtttatttagttggggttgaggtttttggggtaagtaaggagttttttttgtaggtaggttt

SEQ ID NO: 7815 - DNA, 120 bp, synthetic construct
  source 1..120: mol_type = other DNA
aaataaacttaaaaaccgtataacccccaaacctaataaacctaaaactcaaccccacgaaaactaaaattaaaacctttaaaacaaacaaaaaatcccctctacaaacaaacttcccta

SEQ ID NO: 7816 - DNA, 120 bp, synthetic construct
  source 1..120: mol_type = other DNA
ggatgagtttaggagtcgtgtggtttttaggtttggtgggtttgggatttagttttacgggagttggggttgaggtttttggggtaagtaaggagttttttttgtaggtaggtttttttg

SEQ ID NO: 7817 - DNA, 120 bp, synthetic construct
  source 1..120: mol_type = other DNA
tatttcataacatctaacactaaacctaataaatttataacaaatatacaacaaacaatcaatatttattaatatatcaaaatccaaaaacacaaacccaataaccaaaaaaaaaaattc

SEQ ID NO: 7818 - DNA, 120 bp, synthetic construct
  source 1..120: mol_type = other DNA
tattttatagtatttagtattgggtttggtggatttgtagtaggtgtgtaataaataattaatatttattaatatattagggtttaagagtatagatttagtaattaggaaggaaggttt

SEQ ID NO: 7819 - DNA, 120 bp, synthetic construct
  source 1..120: mol_type = other DNA
tcttatatttcataacatctaacactaaacctaataaatttataacaaatatacaacaaactattaatatatcaaaatccaaaaacacaaacccaataaccaaaaaaaaaaattctttaa

SEQ ID NO: 7820 - DNA, 120 bp, synthetic construct
  source 1..120: mol_type = other DNA
ttttatattttatagtatttagtattgggtttggtggatttgtagtaggtgtgtaataaattattaatatattagggtttaagagtatagatttagtaattaggaaggaaggttttttag

SEQ ID NO: 7821 - DNA, 120 bp, synthetic construct; identical to SEQ ID NO: 7817
  source 1..120: mol_type = other DNA

SEQ ID NO: 7822 - DNA, 120 bp, synthetic construct; identical to SEQ ID NO: 7818
  source 1..120: mol_type = other DNA

SEQ ID NO: 7823 - DNA, 120 bp, synthetic construct; identical to SEQ ID NO: 7819
  source 1..120: mol_type = other DNA

SEQ ID NO: 7824 - DNA, 120 bp, synthetic construct; identical to SEQ ID NO: 7820
  source 1..120: mol_type = other DNA

SEQ ID NO: 7825 - DNA, 120 bp, synthetic construct
  source 1..120: mol_type = other DNA
cttaataaaacataaatacaaaacatattattttaaacatttccaattaccaaatttataaaaccataaatatataacattttaaatataaacctaatattcattactaacttaaatttc

SEQ ID NO: 7826 - DNA, 120 bp, synthetic construct
  source 1..120: mol_type = other DNA
tttaataaaatataaatataggatatgttattttgaatatttttagttgttaaatttatggaattataggtatataatattttaagtgtaaatttaatatttattattgatttaaatttt

SEQ ID NO: 7827 - DNA, 120 bp, synthetic construct
  source 1..120: mol_type = other DNA
taaacttaataaaacataaatacaaaacatattattttaaacatttccaattaccaaatttataaatatataacattttaaatataaacctaatattcattactaacttaaatttctttc

SEQ ID NO: 7828 - DNA, 120 bp, synthetic construct
  source 1..120: mol_type = other DNA
taggtttaataaaatataaatataggatatgttattttgaatatttttagttgttaaatttataggtatataatattttaagtgtaaatttaatatttattattgatttaaatttttttt

SEQ ID NO: 7829 - DNA, 120 bp, synthetic construct; identical to SEQ ID NO: 7825
  source 1..120: mol_type = other DNA

SEQ ID NO: 7830 - DNA, 120 bp, synthetic construct; identical to SEQ ID NO: 7826
  source 1..120: mol_type = other DNA

SEQ ID NO: 7831 - DNA, 120 bp, synthetic construct; identical to SEQ ID NO: 7827
  source 1..120: mol_type = other DNA

SEQ ID NO: 7832 - DNA, 120 bp, synthetic construct; identical to SEQ ID NO: 7828
  source 1..120: mol_type = other DNA

SEQ ID NO: 7833 - DNA, 120 bp, synthetic construct
  source 1..120: mol_type = other DNA
taaatatctataaactaactaaataacctaaaaaccttactatttttataaataattttaaaaaaacaccaaacaaatctaattttaaaaaaaactaaccaattattaacaaaatcatta

SEQ ID NO: 7834 - DNA, 120 bp, synthetic construct
  source 1..120: mol_type = other DNA
taaatgtttatggattgattgaatggtttaagagttttattatttttataaatgattttaaaaaagtattaaataaatttggttttaggagaggttagttagttgttaataaggttatta

SEQ ID NO: 7835 - DNA, 120 bp, synthetic construct
  source 1..120: mol_type = other DNA
tatctataaactaactaaataacctaaaaaccttactatttttataaataattttaaattaactaaaaacaccaaacaaatctaattttaaaaaaaactaaccaattattaacaaaatca

SEQ ID NO: 7836 - DNA, 120 bp, synthetic construct
  source 1..120: mol_type = other DNA
tgtttatggattgattgaatggtttaagagttttattatttttataaatgattttaaattagttaaaagtattaaataaatttggttttaggagaggttagttagttgttaataaggtta

SEQ ID NO: 7837 - DNA, 120 bp, synthetic construct; identical to SEQ ID NO: 7833
  source 1..120: mol_type = other DNA

SEQ ID NO: 7838 - DNA, 120 bp, synthetic construct; identical to SEQ ID NO: 7834
  source 1..120: mol_type = other DNA

SEQ ID NO: 7839 - DNA, 120 bp, synthetic construct; identical to SEQ ID NO: 7835
  source 1..120: mol_type = other DNA

SEQ ID NO: 7840 - DNA, 120 bp, synthetic construct; identical to SEQ ID NO: 7836
  source 1..120: mol_type = other DNA

SEQ ID NO: 7841 - DNA, 120 bp, synthetic construct
  source 1..120: mol_type = other DNA
caaaacacattaaaaataaaaaataaaaaaaaacatataaacttcatcaaatacaattcaatctactatataaccctaaaacaacaactacttaccctctccaaacctcaattccccttc

SEQ ID NO: 7842 - DNA, 120 bp, synthetic construct
  source 1..120: mol_type = other DNA
taaaatatattgaaggtggaggatgaggaggggtgtgtggattttgttaagtgtgatttagtttgttgtgtggttttggggtagtagttgtttgttttttttaagttttagttttttttt

SEQ ID NO: 7843 - DNA, 120 bp, synthetic construct
  source 1..120: mol_type = other DNA
acacattaaaaataaaaaataaaaaaaaacatataaacttcatcaaatacaattcaaaccccattctactatataaccctaaaacaacaactacttaccctctccaaacctcaattcccc

SEQ ID NO: 7844 - DNA, 120 bp, synthetic construct
  source 1..120: mol_type = other DNA
atatattgaaggtggaggatgaggaggggtgtgtggattttgttaagtgtgatttaggttttattttgttgtgtggttttggggtagtagttgtttgttttttttaagttttagtttttt

SEQ ID NO: 7845 - DNA, 120 bp, synthetic construct
  source 1..120: mol_type = other DNA
caaaacacattaaaaataaaaaataaaaaaaaacgtataaacttcgtcaaatacgattcaatctactatataaccctaaaacaacaactacttaccctctccaaacctcaattccccttc

SEQ ID NO: 7846 - DNA, 120 bp, synthetic construct
  source 1..120: mol_type = other DNA
taaaatatattgaaggtggaggatgaggaggggcgtgtggatttcgttaagtgcgatttagtttgttgtgtggttttggggtagtagttgtttgttttttttaagttttagttttttttt

SEQ ID NO: 7847 - DNA, 120 bp, synthetic construct
  source 1..120: mol_type = other DNA
acacattaaaaataaaaaataaaaaaaaacgtataaacttcgtcaaatacgattcaaaccccattctactatataaccctaaaacaacaactacttaccctctccaaacctcaattcccc

SEQ ID NO: 7848 - DNA, 120 bp, synthetic construct
  source 1..120: mol_type = other DNA
atatattgaaggtggaggatgaggaggggcgtgtggatttcgttaagtgcgatttaggttttattttgttgtgtggttttggggtagtagttgtttgttttttttaagttttagtttttt

SEQ ID NO: 7849 - DNA, 120 bp, synthetic construct
  source 1..120: mol_type = other DNA
aactaaacaacccctaaactacatccaaacaaatatccatacctacacccccataaaaaactataaaccaaacccccataaaacatttcaaaacacatacctataccttacaaaaaaaat

SEQ ID NO: 7850 - DNA, 120 bp, synthetic construct
  source 1..120: mol_type = other DNA
ggttgagtagtttttgagttgtgtttaggtgggtatttgtgtttgtatttttgtggaaagttgtgaattagatttttataaggtgttttagaatatgtgtttgtgttttgtaggggaaat

SEQ ID NO: 7851 - DNA, 120 bp, synthetic construct
  source 1..120: mol_type = other DNA
taataactaaacaacccctaaactacatccaaacaaatatccatacctacacccccataaaaaccaaacccccataaaacatttcaaaacacatacctataccttacaaaaaaaataaaa

SEQ ID NO: 7852 - DNA, 120 bp, synthetic construct
  source 1..120: mol_type = other DNA
tggtggttgagtagtttttgagttgtgtttaggtgggtatttgtgtttgtatttttgtggaaattagatttttataaggtgttttagaatatgtgtttgtgttttgtaggggaaataaag

SEQ ID NO: 7853 - DNA, 120 bp, synthetic construct
  source 1..120: mol_type = other DNA
aactaaacaacccctaaactacgtccaaacgaatatccgtacctacacccccgtaaaaaactataaaccaaacccccataaaacgtttcaaaacacgtacctataccttacaaaaaaaat

SEQ ID NO: 7854 - DNA, 120 bp, synthetic construct
  source 1..120: mol_type = other DNA
ggttgagtagtttttgagttgcgtttaggcgggtattcgtgtttgtattttcgtggaaagttgtgaattagatttttataaggcgttttagaatacgtgtttgtgttttgtaggggaaat

SEQ ID NO: 7855 - DNA, 120 bp, synthetic construct
  source 1..120: mol_type = other DNA
taataactaaacaacccctaaactacgtccaaacgaatatccgtacctacacccccgtaaaaaccaaacccccataaaacgtttcaaaacacgtacctataccttacaaaaaaaataaaa

SEQ ID NO: 7856 - DNA, 120 bp, synthetic construct
  source 1..120: mol_type = other DNA
tggtggttgagtagtttttgagttgcgtttaggcgggtattcgtgtttgtattttcgtggaaattagatttttataaggcgttttagaatacgtgtttgtgttttgtaggggaaataaag

SEQ ID NO: 7857 - DNA, 120 bp, synthetic construct
  source 1..120: mol_type = other DNA
ttacaccaaaaaaaaaataataaaaaataaatctaaaatcttcattcaaaacatacttaactacaattaacaactataaaaaaactccctttaaaaatcacaatcattcttcataaaaaa

SEQ ID NO: 7858 - DNA, 120 bp, synthetic construct
  source 1..120: mol_type = other DNA
ttgtattagagaggaaataatgaaaagtgaatttaaaatttttatttaaagtatatttgattatagttgataattataaagaagttttttttgaaaattgtaattattttttatgaggga

SEQ ID NO: 7859 - DNA, 120 bp, synthetic construct
  source 1..120: mol_type = other DNA
acatattacaccaaaaaaaaaataataaaaaataaatctaaaatcttcattcaaaacatacttaacaactataaaaaaactccctttaaaaatcacaatcattcttcataaaaaacatca

SEQ ID NO: 7860 - DNA, 120 bp, synthetic construct
  source 1..120: mol_type = other DNA
atatgttgtattagagaggaaataatgaaaagtgaatttaaaatttttatttaaagtatatttgataattataaagaagttttttttgaaaattgtaattattttttatgagggatgtta

SEQ ID NO: 7861 - DNA, 120 bp, synthetic construct
  source 1..120: mol_type = other DNA
ttacaccaaaaaaaaaataataaaaaataaatctaaaatcttcattcaaaacatacttaactacaattaacaactataaaaaaactccctttaaaaatcgcaatcattcttcataaaaaa

SEQ ID NO: 7862 - DNA, 120 bp, synthetic construct
  source 1..120: mol_type = other DNA
ttgtattagagaggaaataatgaaaagtgaatttaaaatttttatttaaagtatatttgattatagttgataattataaagaagttttttttgaaaatcgtaattattttttatgaggga

SEQ ID NO: 7863 - DNA, 120 bp, synthetic construct
  source 1..120: mol_type = other DNA
acatattacaccaaaaaaaaaataataaaaaataaatctaaaatcttcattcaaaacatacttaacaactataaaaaaactccctttaaaaatcgcaatcattcttcataaaaaacgtca

SEQ ID NO: 7864 - DNA, 120 bp, synthetic construct
  source 1..120: mol_type = other DNA
atatgttgtattagagaggaaataatgaaaagtgaatttaaaatttttatttaaagtatatttgataattataaagaagttttttttgaaaatcgtaattattttttatgagggacgtta

SEQ ID NO: 7865 - DNA, 120 bp, synthetic construct
  source 1..120: mol_type = other DNA
aaaaaataataaaaataaataaataataaactataacaacaaaaaaaactataaaatccacacaacaaaaatatcaaaaaaaatataaattcccttaaactacccttaccaaacactaca

SEQ ID NO: 7866 - DNA, 120 bp, synthetic construct
  source 1..120: mol_type = other DNA
aaaaaataataaaaataaataaatgataagttatgatagtagggagagttgtgagatttatataatagaggtgttagagagggtgtgggtttttttaggttgtttttgttaggtattata

SEQ ID NO: 7867 - DNA, 120 bp, synthetic construct
  source 1..120: mol_type = other DNA
cacaaaaaaataataaaaataaataaataataaactataacaacaaaaaaaactataaaatcaaaaatatcaaaaaaaatataaattcccttaaactacccttaccaaacactacaaaat

SEQ ID NO: 7868 - DNA, 120 bp, synthetic construct
  source 1..120: mol_type = other DNA
tgtaaaaaaataataaaaataaataaatgataagttatgatagtagggagagttgtgagattagaggtgttagagagggtgtgggtttttttaggttgtttttgttaggtattataaggt

SEQ ID NO: 7869 - DNA, 120 bp, synthetic construct; identical to SEQ ID NO: 7865
  source 1..120: mol_type = other DNA

SEQ ID NO: 7870 - DNA, 120 bp, synthetic construct; identical to SEQ ID NO: 7866
  source 1..120: mol_type = other DNA

SEQ ID NO: 7871 - DNA, 120 bp, synthetic construct
  source 1..120: mol_type = other DNA
cgcaaaaaaataataaaaataaataaataataaactataacaacaaaaaaaactataaaatcaaaaatatcaaaaaaaatataaattcccttaaactacccttaccaaacactacaaaat

SEQ ID NO: 7872 - DNA, 120 bp, synthetic construct
  source 1..120: mol_type = other DNA
cgtaaaaaaataataaaaataaataaatgataagttatgatagtagggagagttgtgagattagaggtgttagagagggtgtgggtttttttaggttgtttttgttaggtattataaggt

SEQ ID NO: 7873 - DNA, 120 bp, synthetic construct
  source 1..120: mol_type = other DNA
aactccaaaaccccaatacttcctactaataacttcaactcccaatcacttatcaaaaatacaaaactaaacccctaaaaattatataaaacaaaacccaaaaatctacattctaacaaa

SEQ ID NO: 7874 - DNA, 120 bp, synthetic construct
  source 1..120: mol_type = other DNA
gattttaggattttagtgttttttattggtggttttagtttttggttatttgttgggaatgtagggttgaatttttggaggttgtgtgggatagggtttaggaatttgtattttagtaag

SEQ ID NO: 7875 - DNA, 120 bp, synthetic construct
  source 1..120: mol_type = other DNA
ccaaaaccccaatacttcctactaataacttcaactcccaatcacttatcaaaaatacaatatccaaaactaaacccctaaaaattatataaaacaaaacccaaaaatctacattctaac

SEQ ID NO: 7876 - DNA, 120 bp, synthetic construct
  source 1..120: mol_type = other DNA
ttaggattttagtgttttttattggtggttttagtttttggttatttgttgggaatgtagtgtttagggttgaatttttggaggttgtgtgggatagggtttaggaatttgtattttagt

SEQ ID NO: 7877 - DNA, 120 bp, synthetic construct
  source 1..120: mol_type = other DNA
aactccaaaaccccaatacttcctactaataacttcaactcccgatcacttatcgaaaatacaaaactaaacccctaaaaattatataaaacaaaacccaaaaatctacattctaacaaa

SEQ ID NO: 7878 - DNA, 120 bp, synthetic construct
  source 1..120: mol_type = other DNA
gattttaggattttagtgttttttattggtggttttagttttcggttatttgtcgggaatgtagggttgaatttttggaggttgtgtgggatagggtttaggaatttgtattttagtaag

SEQ ID NO: 7879 - DNA, 120 bp, synthetic construct
  source 1..120: mol_type = other DNA
ccaaaaccccaatacttcctactaataacttcaactcccgatcacttatcgaaaatacaatatccaaaactaaacccctaaaaattatataaaacaaaacccaaaaatctacattctaac

SEQ ID NO: 7880 - DNA, 120 bp, synthetic construct
  source 1..120: mol_type = other DNA
ttaggattttagtgttttttattggtggttttagttttcggttatttgtcgggaatgtagtgtttagggttgaatttttggaggttgtgtgggatagggtttaggaatttgtattttagt

SEQ ID NO: 7881 - DNA, 120 bp, synthetic construct
  source 1..120: mol_type = other DNA
aatttaattaaaaaaacaaaatactaaaaaatctaccactaaactttttaaatcaaaaatttatataaaataaaacatatctactatctaatctataaaatttaaaatctttttaattct

SEQ ID NO: 7882 - DNA, 120 bp, synthetic construct
  source 1..120: mol_type = other DNA
ggtttagttgagaaaataaaatattaaaaaatttgttattagattttttaagttaagagtttgtataaaatgaaatatatttattatttaatttataaaatttagaatttttttaatttt

SEQ ID NO: 7883 - DNA, 120 bp, synthetic construct
  source 1..120: mol_type = other DNA
aattaaaaaaacaaaatactaaaaaatctaccactaaactttttaaatcaaaaatttatctaaactatataaaataaaacatatctactatctaatctataaaatttaaaatctttttaa

SEQ ID NO: 7884 - DNA, 120 bp, synthetic construct
  source 1..120: mol_type = other DNA
agttgagaaaataaaatattaaaaaatttgttattagattttttaagttaagagtttgtttagattgtataaaatgaaatatatttattatttaatttataaaatttagaatttttttaa

SEQ ID NO: 7885 - DNA, 120 bp, synthetic construct; identical to SEQ ID NO: 7881
  source 1..120: mol_type = other DNA

SEQ ID NO: 7886 - DNA, 120 bp, synthetic construct; identical to SEQ ID NO: 7882
  source 1..120: mol_type = other DNA

SEQ ID NO: 7887 - DNA, 120 bp, synthetic construct; identical to SEQ ID NO: 7883
  source 1..120: mol_type = other DNA

SEQ ID NO: 7888 - DNA, 120 bp, synthetic construct; identical to SEQ ID NO: 7884
  source 1..120: mol_type = other DNA

SEQ ID NO: 7889 - DNA, 120 bp, synthetic construct
  source 1..120: mol_type = other DNA
accacacaaaacaaacaaactaaaaaaatacaaactccctccataaactctctctacataaaaaacaaacaaacaaaaccctaaaaaataaccaaaaaaaaacaactccataattaaaaa

SEQ ID NO: 7890 - DNA, 120 bp, synthetic construct
  source 1..120: mol_type = other DNA
gttatgtaaagtaggtgggttgaaaagatgtaggttttttttatgggttttttttgtatgggaagtaggtgggtggggttttggaaggtggttagggaagagtagttttatgattaaagg

SEQ ID NO: 7891 - DNA, 120 bp, synthetic construct
  source 1..120: mol_type = other DNA
acaaaccacacaaaacaaacaaactaaaaaaatacaaactccctccataaactctctctaccaaacaaacaaaaccctaaaaaataaccaaaaaaaaacaactccataattaaaaaatta

SEQ ID NO: 7892 - DNA, 120 bp, synthetic construct
  source 1..120: mol_type = other DNA
gtaagttatgtaaagtaggtgggttgaaaagatgtaggttttttttatgggttttttttgttaggtgggtggggttttggaaggtggttagggaagagtagttttatgattaaagggttg

SEQ ID NO: 7893 - DNA, 120 bp, synthetic construct
  source 1..120: mol_type = other DNA
accacgcaaaacaaacgaactaaaaaaatacaaactccctccataaactctctctacataaaaaacaaacgaacgaaaccctaaaaaataaccaaaaaaaaacaactccataattaaaaa

SEQ ID NO: 7894 - DNA, 120 bp, synthetic construct
  source 1..120: mol_type = other DNA
gttacgtaaagtaggcgggttgaaaagatgtaggttttttttatgggttttttttgtatgggaagtaggcgggcggggttttggaaggtggttagggaagagtagttttatgattaaagg

SEQ ID NO: 7895 - DNA, 120 bp, synthetic construct
  source 1..120: mol_type = other DNA
acaaaccacgcaaaacaaacgaactaaaaaaatacaaactccctccataaactctctctaccaaacgaacgaaaccctaaaaaataaccaaaaaaaaacaactccataattaaaaaatta

SEQ ID NO: 7896 - DNA, 120 bp, synthetic construct
  source 1..120: mol_type = other DNA
gtaagttacgtaaagtaggcgggttgaaaagatgtaggttttttttatgggttttttttgttaggcgggcggggttttggaaggtggttagggaagagtagttttatgattaaagggttg

SEQ ID NO: 7897 - DNA, 120 bp, synthetic construct
  source 1..120: mol_type = other DNA
actcaaaataacaacattttattaaaaatttaattaaaatcttctacattatacatatttattcaaaattaattttaattaaaatattacttttatacaaattctataataaaataaaaa

SEQ ID NO: 7898 - DNA, 120 bp, synthetic construct
  source 1..120: mol_type = other DNA
atttaaaatggtagtgttttgttggagatttaattgaggttttttgtattatgtatatttatttagagttgattttagttgaggtattgtttttgtatagattttgtgatagaatgagag

SEQ ID NO: 7899 - DNA, 120 bp, synthetic construct
  source 1..120: mol_type = other DNA
aaataacaacattttattaaaaatttaattaaaatcttctacattatacatatttataaaaaacccttcaaaattaattttaattaaaatattacttttatacaaattctataataaaat

SEQ ID NO: 7900 - DNA, 120 bp, synthetic construct
  source 1..120: mol_type = other DNA
aaatggtagtgttttgttggagatttaattgaggttttttgtattatgtatatttataaaagattttttagagttgattttagttgaggtattgtttttgtatagattttgtgatagaat

SEQ ID NO: 7901 - DNA, 120 bp, synthetic construct
  source 1..120: mol_type = other DNA
actcaaaataacaacgttttattaaaaatttaattaaaatcttctacattatacatatttattcaaaattaattttaattaaaatattacttttatacaaattctataataaaataaaaa

SEQ ID NO: 7902 - DNA, 120 bp, synthetic construct
  source 1..120: mol_type = other DNA
atttaaaatggtagcgttttgttggagatttaattgaggttttttgtattatgtatatttatttagagttgattttagttgaggtattgtttttgtatagattttgtgatagaatgagag

SEQ ID NO: 7903 - DNA, 120 bp, synthetic construct
  source 1..120: mol_type = other DNA
aaataacaacgttttattaaaaatttaattaaaatcttctacattatacatatttataaaaaacccttcaaaattaattttaattaaaatattacttttatacaaattctataataaaat

SEQ ID NO: 7904 - DNA, 120 bp, synthetic construct
  source 1..120: mol_type = other DNA
aaatggtagcgttttgttggagatttaattgaggttttttgtattatgtatatttataaaagattttttagagttgattttagttgaggtattgtttttgtatagattttgtgatagaat

SEQ ID NO: 7905 - DNA, 120 bp, synthetic construct
  source 1..120: mol_type = other DNA
cttaaactaccattctctaaatcttttctatcccaatccatctctcctcatcaatctacactaaaaatatcccataattatttcttcttaattatccaaactactttctaaaaaaaaaat

SEQ ID NO: 7906 - DNA, 120 bp, synthetic construct
  source 1..120: mol_type = other DNA
tttgggttgttattttttggattttttttgttttagtttatttttttttgttagtttgtattgagggtgttttataattatttttttttggttatttagattattttttgaaaaggaaat

SEQ ID NO: 7907 - DNA, 120 bp, synthetic construct
  source 1..120: mol_type = other DNA
ctctcttaaactaccattctctaaatcttttctatcccaatccatctctcctcatcaatctaatatcccataattatttcttcttaattatccaaactactttctaaaaaaaaaatacaa

SEQ ID NO: 7908 - DNA, 120 bp, synthetic construct
  source 1..120: mol_type = other DNA
tttttttgggttgttattttttggattttttttgttttagtttatttttttttgttagtttggtgttttataattatttttttttggttatttagattattttttgaaaaggaaatatga

SEQ ID NO: 7909 - DNA, 120 bp, synthetic construct
  source 1..120: mol_type = other DNA
cttaaactaccattctctaaatcttttctatcccaatccatctctcctcgtcaatctacactaaaaatatcccataattatttcttcttaattatccaaactactttctaaaaaaaaaat

SEQ ID NO: 7910 - DNA, 120 bp, synthetic construct
  source 1..120: mol_type = other DNA
tttgggttgttattttttggattttttttgttttagtttattttttttcgttagtttgtattgagggtgttttataattatttttttttggttatttagattattttttgaaaaggaaat

SEQ ID NO: 7911 - DNA, 120 bp, synthetic construct
  source 1..120: mol_type = other DNA
ctctcttaaactaccattctctaaatcttttctatcccaatccatctctcctcgtcaatctaatatcccataattatttcttcttaattatccaaactactttctaaaaaaaaaatacga

SEQ ID NO: 7912 - DNA, 120 bp, synthetic construct
  source 1..120: mol_type = other DNA
tttttttgggttgttattttttggattttttttgttttagtttattttttttcgttagtttggtgttttataattatttttttttggttatttagattattttttgaaaaggaaatacga

SEQ ID NO: 7913 - DNA, 120 bp, synthetic construct
  source 1..120: mol_type = other DNA
acatatatataattaattaaaattatttattttataaatacaataccaaaaattatatttcactataaaatacaaaatttactctcactaaaaaacctaaaaaaacaatacaaacacatt

SEQ ID NO: 7914 - DNA, 120 bp, synthetic construct
  source 1..120: mol_type = other DNA
atatgtatgtaattggttagaattgtttgttttgtaaatatagtgttaagagttatgttttgttgtgaaatataaagtttatttttattagaaaatttggaaaagtgatatagatatatt

SEQ ID NO: 7915 - DNA, 120 bp, synthetic construct
  source 1..120: mol_type = other DNA
atatataattaattaaaattatttattttataaatacaataccaaaaattatatttcactaaaaaactataaaatacaaaatttactctcactaaaaaacctaaaaaaacaatacaaaca

SEQ ID NO: 7916 - DNA, 120 bp, synthetic construct
  source 1..120: mol_type = other DNA
gtatgtaattggttagaattgtttgttttgtaaatatagtgttaagagttatgttttattgaagagttgtgaaatataaagtttatttttattagaaaatttggaaaagtgatatagata

SEQ ID NO: 7917 - DNA, 120 bp, synthetic construct
  source 1..120: mol_type = other DNA
acatatatataattaattaaaattatttattttataaatacaataccaaaaattatatttcgctataaaatacaaaatttactctcactaaaaaacctaaaaaaacgatacaaacacatt

SEQ ID NO: 7918 - DNA, 120 bp, synthetic construct
  source 1..120: mol_type = other DNA
atatgtatgtaattggttagaattgtttgttttgtaaatatagtgttaagagttatgtttcgttgtgaaatataaagtttatttttattagaaaatttggaaaagcgatatagatatatt

SEQ ID NO: 7919 - DNA, 120 bp, synthetic construct
  source 1..120: mol_type = other DNA
atatataattaattaaaattatttattttataaatacaataccaaaaattatatttcactaaaaaactataaaatacaaaatttactctcactaaaaaacctaaaaaaacgatacaaaca

SEQ ID NO: 7920 - DNA, 120 bp, synthetic construct
  source 1..120: mol_type = other DNA
gtatgtaattggttagaattgtttgttttgtaaatatagtgttaagagttatgttttattgaagagttgtgaaatataaagtttatttttattagaaaatttggaaaagcgatatagata

SEQ ID NO: 7921 - DNA, 120 bp, synthetic construct
  source 1..120: mol_type = other DNA
acattataatattaatcccaaaaaacattactaatttatcattttcttaattatcttcttattatatattatatcattaaaacaaaaatttcttcatcaatacaaaaaataatacaaaaa

SEQ ID NO: 7922 - DNA, 120 bp, synthetic construct
  source 1..120: mol_type = other DNA
gtattatggtgttggttttggaaaatattattaatttgttatttttttgattatttttttattgtatgttgtattattgagatagggatttttttattaatataaaagatgatgtggaga

SEQ ID NO: 7923 - DNA, 120 bp, synthetic construct
  source 1..120: mol_type = other DNA
aaaaaacattataatattaatcccaaaaaacattactaatttatcattttcttaattatcttattatatcattaaaacaaaaatttcttcatcaatacaaaaaataatacaaaaacaact

SEQ ID NO: 7924 - DNA, 120 bp, synthetic construct
  source 1..120: mol_type = other DNA
gaaaggtattatggtgttggttttggaaaatattattaatttgttatttttttgattattttgttgtattattgagatagggatttttttattaatataaaagatgatgtggagataatt

SEQ ID NO: 7925 - DNA, 120 bp, synthetic construct
  source 1..120: mol_type = other DNA
acattataatattaatcccgaaaaacattactaatttatcattttcttaattatcttcttattatatattatatcattaaaacaaaaatttcttcatcaatacaaaaaataatacgaaaa

SEQ ID NO: 7926 - DNA, 120 bp, synthetic construct
  source 1..120: mol_type = other DNA
gtattatggtgttggtttcggaaaatattattaatttgttatttttttgattatttttttattgtatgttgtattattgagatagggatttttttattaatataaaagatgatgcggaga

SEQ ID NO: 7927 - DNA, 120 bp, synthetic construct
  source 1..120: mol_type = other DNA
aaaaaacattataatattaatcccgaaaaacattactaatttatcattttcttaattatcttattatatcattaaaacaaaaatttcttcatcaatacaaaaaataatacgaaaacaact

SEQ ID NO: 7928 - DNA, 120 bp, synthetic construct
  source 1..120: mol_type = other DNA
gaaaggtattatggtgttggtttcggaaaatattattaatttgttatttttttgattattttgttgtattattgagatagggatttttttattaatataaaagatgatgcggagataatt

SEQ ID NO: 7929 - DNA, 120 bp, synthetic construct
  source 1..120: mol_type = other DNA
aaaatacccacctacacaaaaacaaaattacaaattcattaaaaacaacaaaataaaaaatatttaaattctaaacccataaactaaaatatactcccaactctctcaacaaataccctc

SEQ ID NO: 7930 - DNA, 120 bp, synthetic construct
  source 1..120: mol_type = other DNA
gaggtgtttatttgtataaagatagagttgtaagtttattaaaaatagtaagatgagaagtgtttagattttaaatttataagttaaaatatgtttttagtttttttagtaagtgttttt

SEQ ID NO: 7931 - DNA, 120 bp, synthetic construct
  source 1..120: mol_type = other DNA
tacccacctacacaaaaacaaaattacaaattcattaaaaacaacaaaataaaaaatatatctaaatttaaattctaaacccataaactaaaatatactcccaactctctcaacaaatac

SEQ ID NO: 7932 - DNA, 120 bp, synthetic construct
  source 1..120: mol_type = other DNA
tgtttatttgtataaagatagagttgtaagtttattaaaaatagtaagatgagaagtgtatttgagtttagattttaaatttataagttaaaatatgtttttagtttttttagtaagtgt

SEQ ID NO: 7933 - DNA, 120 bp, synthetic construct; identical to SEQ ID NO: 7929
  source 1..120: mol_type = other DNA

SEQ ID NO: 7934 - DNA, 120 bp, synthetic construct; identical to SEQ ID NO: 7930
  source 1..120: mol_type = other DNA

SEQ ID NO: 7935 - DNA, 120 bp, synthetic construct; identical to SEQ ID NO: 7931
  source 1..120: mol_type = other DNA

SEQ ID NO: 7936 - DNA, 120 bp, synthetic construct; identical to SEQ ID NO: 7932
  source 1..120: mol_type = other DNA

SEQ ID NO: 7937 - DNA, 120 bp, synthetic construct
  source 1..120: mol_type = other DNA
taaaaaaaatcccaacaatacacatttcaaaaatataaaataatcaaacttacaaaaacctaaaaaacaattaaaaaaaatataaaaaaacataaataaaaaacctaaaattataaaaca

SEQ ID NO: 7938 - DNA, 120 bp, synthetic construct
  source 1..120: mol_type = other DNA
taaaggggattttagtagtatatattttgagggtatgaaatagttaggtttatagaggtttgaggagtaattgaaggaagtatggaggggtatgagtagaaagtttgaggttgtggggta

SEQ ID NO: 7939 - DNA, 120 bp, synthetic construct
  source 1..120: mol_type = other DNA
aaaaatcccaacaatacacatttcaaaaatataaaataatcaaacttacaaaaacctaattaataaaaaaacaattaaaaaaaatataaaaaaacataaataaaaaacctaaaattataa

SEQ ID NO: 7940 - DNA, 120 bp, synthetic construct
  source 1..120: mol_type = other DNA
ggggattttagtagtatatattttgagggtatgaaatagttaggtttatagaggtttgattaatggaggagtaattgaaggaagtatggaggggtatgagtagaaagtttgaggttgtgg

SEQ ID NO: 7941 - DNA, 120 bp, synthetic construct
  source 1..120: mol_type = other DNA
taaaaaaaatcccaacaatacacatttcgaaaatataaaataatcaaacttacaaaaacctaaaaaacaattaaaaaaaatataaaaaaacataaataaaaaacctaaaattataaaaca

SEQ ID NO: 7942 - DNA, 120 bp, synthetic construct
  source 1..120: mol_type = other DNA
taaaggggattttagtagtatatatttcgagggtatgaaatagttaggtttatagaggtttgaggagtaattgaaggaagtatggaggggtatgagtagaaagtttgaggttgtggggta

SEQ ID NO: 7943 - DNA, 120 bp, synthetic construct
  source 1..120: mol_type = other DNA
aaaaatcccaacaatacacatttcgaaaatataaaataatcaaacttacaaaaacctaattaataaaaaaacaattaaaaaaaatataaaaaaacataaataaaaaacctaaaattataa

SEQ ID NO: 7944 - DNA, 120 bp, synthetic construct
  source 1..120: mol_type = other DNA
ggggattttagtagtatatatttcgagggtatgaaatagttaggtttatagaggtttgattaatggaggagtaattgaaggaagtatggaggggtatgagtagaaagtttgaggttgtgg

SEQ ID NO: 7945 - DNA, 120 bp, synthetic construct
  source 1..120: mol_type = other DNA
ataccactcaaccaattaataaaaaatcaaaaaccaattttcattttctaactataataatctatttaatttttttctaattaaattaaatcaaacaattcaaaaaaaaaaataaatata

SEQ ID NO: 7946 - DNA, 120 bp, synthetic construct
  source 1..120: mol_type = other DNA
atgttatttagttaattagtaggagattaaagattagtttttattttttgattatgatgatttgtttggtttttttttaattagattgggttaagtagtttagaaagaagggtgaatgta

SEQ ID NO: 7947 - DNA, 120 bp, synthetic construct
  source 1..120: mol_type = other DNA
tataataccactcaaccaattaataaaaaatcaaaaaccaattttcattttctaactataattaatttttttctaattaaattaaatcaaacaattcaaaaaaaaaaataaatataaaat

SEQ ID NO: 7948 - DNA, 120 bp, synthetic construct
  source 1..120: mol_type = other DNA
tatgatgttatttagttaattagtaggagattaaagattagtttttattttttgattatgattggtttttttttaattagattgggttaagtagtttagaaagaagggtgaatgtagagt

SEQ ID NO: 7949 - DNA, 120 bp, synthetic construct; identical to SEQ ID NO: 7945
  source 1..120: mol_type = other DNA

SEQ ID NO: 7950 - DNA, 120 bp, synthetic construct; identical to SEQ ID NO: 7946
  source 1..120: mol_type = other DNA

SEQ ID NO: 7951 - DNA, 120 bp, synthetic construct; identical to SEQ ID NO: 7947
  source 1..120: mol_type = other DNA

SEQ ID NO: 7952 - DNA, 120 bp, synthetic construct; identical to SEQ ID NO: 7948
  source 1..120: mol_type = other DNA

SEQ ID NO: 7953 - DNA, 120 bp, synthetic construct
  source 1..120: mol_type = other DNA
tctattttcttcatcaatctatccacaaaatctaaaacaatcttcattacataataaacacttatcaaatatctatttaataaattccaacaatctttaaaattaaaatataaataaaaa

SEQ ID NO: 7954 - DNA, 120 bp, synthetic construct
  source 1..120: mol_type = other DNA
tttgttttttttattggtttatttataaagtttagaatagtttttgttgtatagtaggtatttgttaaatatttgtttaatgaattttaatggtttttaaagttgaagtgtaggtgaaga

SEQ ID NO: 7955 - DNA, 120 bp, synthetic construct
  source 1..120: mol_type = other DNA
ttttctattttcttcatcaatctatccacaaaatctaaaacaatcttcattacataataaacaaatatctatttaataaattccaacaatctttaaaattaaaatataaataaaaataaa

SEQ ID NO: 7956 - DNA, 120 bp, synthetic construct
  source 1..120: mol_type = other DNA
ttttttgttttttttattggtttatttataaagtttagaatagtttttgttgtatagtaggtaaatatttgtttaatgaattttaatggtttttaaagttgaagtgtaggtgaagataag

SEQ ID NO: 7957 - DNA, 120 bp, synthetic construct
  source 1..120: mol_type = other DNA
tctattttcttcatcgatctatccacaaaatctaaaacaatcttcgttacataataaacacttatcaaatatctatttaataaattccaacgatctttaaaattaaaatataaataaaaa

SEQ ID NO: 7958 - DNA, 120 bp, synthetic construct
  source 1..120: mol_type = other DNA
tttgttttttttatcggtttatttataaagtttagaatagttttcgttgtatagtaggtatttgttaaatatttgtttaatgaattttaacggtttttaaagttgaagtgtaggtgaaga

SEQ ID NO: 7959 - DNA, 120 bp, synthetic construct
  source 1..120: mol_type = other DNA
ttttctattttcttcatcgatctatccacaaaatctaaaacaatcttcgttacataataaacaaatatctatttaataaattccaacgatctttaaaattaaaatataaataaaaataaa

SEQ ID NO: 7960 - DNA, 120 bp, synthetic construct
  source 1..120: mol_type = other DNA
ttttttgttttttttatcggtttatttataaagtttagaatagttttcgttgtatagtaggtaaatatttgtttaatgaattttaacggtttttaaagttgaagtgtaggtgaagataag

SEQ ID NO: 7961 - DNA, 120 bp, synthetic construct
  source 1..120: mol_type = other DNA
ttaaaataaataatttaatttataaatattctaaaatataatatttaaaattctcctttaaactactaatacaatttacctcaaactaaactataacaacttatacttaaatataaacca

SEQ ID NO: 7962 - DNA, 120 bp, synthetic construct
  source 1..120: mol_type = other DNA
ttagagtaggtggtttaatttataaatattttggaatataatgtttaaaatttttttttaaattgttgatgtaatttattttagattgaattatagtaatttgtatttaaatataaatta

SEQ ID NO: 7963 - DNA, 120 bp, synthetic construct
  source 1..120: mol_type = other DNA
ataaataatttaatttataaatattctaaaatataatatttaaaattctcctttaaactataactactactaatacaatttacctcaaactaaactataacaacttatacttaaatataa

SEQ ID NO: 7964 - DNA, 120 bp, synthetic construct
  source 1..120: mol_type = other DNA
gtaggtggtttaatttataaatattttggaatataatgtttaaaatttttttttaaattatgattattgttgatgtaatttattttagattgaattatagtaatttgtatttaaatataa

SEQ ID NO: 7965 - DNA, 120 bp, synthetic construct; identical to SEQ ID NO: 7961
  source 1..120: mol_type = other DNA

SEQ ID NO: 7966 - DNA, 120 bp, synthetic construct; identical to SEQ ID NO: 7962
  source 1..120: mol_type = other DNA

SEQ ID NO: 7967 - DNA, 120 bp, synthetic construct; identical to SEQ ID NO: 7963
  source 1..120: mol_type = other DNA

SEQ ID NO: 7968 - DNA, 120 bp, synthetic construct; identical to SEQ ID NO: 7964
  source 1..120: mol_type = other DNA

SEQ ID NO: 7969 - DNA, 120 bp, synthetic construct
  source 1..120: mol_type = other DNA
atactaaatcatttttaaataaactcttaattaataaacctatattttttaatacctcctatattatccattcatctaaaataaaaactcttttttacactacaaaactacaacatatat

SEQ ID NO: 7970 - DNA, 120 bp, synthetic construct
  source 1..120: mol_type = other DNA
atgttgaattatttttaaatgggtttttgattaatagatttgtattttttagtgttttttatgttgtttatttgtttaaaatgaaagtttttttttgtattgtaaaattataatatatgt

SEQ ID NO: 7971 - DNA, 120 bp, synthetic construct
  source 1..120: mol_type = other DNA
ctaaatactaaatcatttttaaataaactcttaattaataaacctatattttttaataccttccattcatctaaaataaaaactcttttttacactacaaaactacaacatatatcatct

SEQ ID NO: 7972 - DNA, 120 bp, synthetic construct
  source 1..120: mol_type = other DNA
ttaaatgttgaattatttttaaatgggtttttgattaatagatttgtattttttagtgttttttatttgtttaaaatgaaagtttttttttgtattgtaaaattataatatatgttattt

SEQ ID NO: 7973 - DNA, 120 bp, synthetic construct
  source 1..120: mol_type = other DNA
atactaaatcatttttaaataaactcttaattaataaacctatattttttaatacctcctatattatccattcgtctaaaataaaaactcttttttacactacaaaactacaacatatat

SEQ ID NO: 7974 - DNA, 120 bp, synthetic construct
  source 1..120: mol_type = other DNA
atgttgaattatttttaaatgggtttttgattaatagatttgtattttttagtgttttttatgttgtttattcgtttaaaatgaaagtttttttttgtattgtaaaattataatatatgt

SEQ ID NO: 7975 - DNA, 120 bp, synthetic construct
  source 1..120: mol_type = other DNA
ctaaatactaaatcatttttaaataaactcttaattaataaacctatattttttaataccttccattcgtctaaaataaaaactcttttttacactacaaaactacaacatatatcatct

SEQ ID NO: 7976 - DNA, 120 bp, synthetic construct
  source 1..120: mol_type = other DNA
ttaaatgttgaattatttttaaatgggtttttgattaatagatttgtattttttagtgttttttattcgtttaaaatgaaagtttttttttgtattgtaaaattataatatatgttattt

SEQ ID NO: 7977 - DNA, 120 bp, synthetic construct
  source 1..120: mol_type = other DNA
aaaatttttacaaatcaaataattttacctctttccaaaaaaaaaaacttcaaaaatataatatatacatttcaaaaaaccataactaattcatcaaaattatcaaaacttataacattt

SEQ ID NO: 7978 - DNA, 120 bp, synthetic construct
  source 1..120: mol_type = other DNA
aaaatttttataagttaaatagttttgtttttttttagagaaagagattttaggagtatgatatgtgtattttaaaaggttatggttaatttattaaggttattaaagtttatggtattt

SEQ ID NO: 7979 - DNA, 120 bp, synthetic construct
  source 1..120: mol_type = other DNA
ttaaaaatttttacaaatcaaataattttacctctttccaaaaaaaaaaacttcaaaaatatacatttcaaaaaaccataactaattcatcaaaattatcaaaacttataacatttctaa

SEQ ID NO: 7980 - DNA, 120 bp, synthetic construct
  source 1..120: mol_type = other DNA
ttgaaaatttttataagttaaatagttttgtttttttttagagaaagagattttaggagtatgtattttaaaaggttatggttaatttattaaggttattaaagtttatggtatttttga

SEQ ID NO: 7981 - DNA, 120 bp, synthetic construct; identical to SEQ ID NO: 7977
  source 1..120: mol_type = other DNA

SEQ ID NO: 7982 - DNA, 120 bp, synthetic construct; identical to SEQ ID NO: 7978
  source 1..120: mol_type = other DNA

SEQ ID NO: 7983 - DNA, 120 bp, synthetic construct; identical to SEQ ID NO: 7979
  source 1..120: mol_type = other DNA

SEQ ID NO: 7984 - DNA, 120 bp, synthetic construct; identical to SEQ ID NO: 7980
  source 1..120: mol_type = other DNA

SEQ ID NO: 7985 - DNA, 120 bp, synthetic construct
  source 1..120: mol_type = other DNA
aaacatatacataatacaataaaactcatcaaaaaaataataaaaaacacaaaataaatcctacataaaaattaaatcaatatatttttaaattaaaaattacaataattattactataa

SEQ ID NO: 7986 - DNA, 120 bp, synthetic construct
  source 1..120: mol_type = other DNA
aagtgtgtgtataatataatgaaatttattaaagaagtgataaaaaatataaagtagattttgtatggaaattgaattagtatgtttttgaattaagaattatagtagttgttgttataa

SEQ ID NO: 7987 - DNA, 120 bp, synthetic construct
  source 1..120: mol_type = other DNA
taaaaaacatatacataatacaataaaactcatcaaaaaaataataaaaaacacaaaataataaaaattaaatcaatatatttttaaattaaaaattacaataattattactataaacaa

SEQ ID NO: 7988 - DNA, 120 bp, synthetic construct
  source 1..120: mol_type = other DNA
tagaaagtgtgtgtataatataatgaaatttattaaagaagtgataaaaaatataaagtagtggaaattgaattagtatgtttttgaattaagaattatagtagttgttgttataagtaa

SEQ ID NO: 7989 - DNA, 120 bp, synthetic construct
  source 1..120: mol_type = other DNA
aaacgtatacataatacaataaaactcatcaaaaaaataataaaaaacacaaaataaatcctacataaaaattaaatcaatatatttttaaattaaaaattacaataattattactataa

SEQ ID NO: 7990 - DNA, 120 bp, synthetic construct
  source 1..120: mol_type = other DNA
aagcgtgtgtataatataatgaaatttattaaagaagtgataaaaaatataaagtagattttgtatggaaattgaattagtatgtttttgaattaagaattatagtagttgttgttataa

SEQ ID NO: 7991 - DNA, 120 bp, synthetic construct
  source 1..120: mol_type = other DNA
taaaaaacgtatacataatacaataaaactcatcaaaaaaataataaaaaacacaaaataataaaaattaaatcaatatatttttaaattaaaaattacaataattattactataaacaa

SEQ ID NO: 7992 - DNA, 120 bp, synthetic construct
  source 1..120: mol_type = other DNA
tagaaagcgtgtgtataatataatgaaatttattaaagaagtgataaaaaatataaagtagtggaaattgaattagtatgtttttgaattaagaattatagtagttgttgttataagtaa

SEQ ID NO: 7993 - DNA, 120 bp, synthetic construct
  source 1..120: mol_type = other DNA
tattacttttactaattaaatctaataatttataaataatattaaaatttctatatacatttcttccattctaatctttttaaaatttatataaaatacactaatatatttatttatatt

SEQ ID NO: 7994 - DNA, 120 bp, synthetic construct
  source 1..120: mol_type = other DNA
tgttgtttttattaattaagtttaatagtttatagatagtattggaatttttatgtgtattttttttattttaatttttttaaaatttatataggatatattaatatatttatttatgtt

SEQ ID NO: 7995 - DNA, 120 bp, synthetic construct
  source 1..120: mol_type = other DNA
ctaatattacttttactaattaaatctaataatttataaataatattaaaatttctatatacattctaatctttttaaaatttatataaaatacactaatatatttatttatatttattt

SEQ ID NO: 7996 - DNA, 120 bp, synthetic construct
  source 1..120: mol_type = other DNA
ttgatgttgtttttattaattaagtttaatagtttatagatagtattggaatttttatgtgtattttaatttttttaaaatttatataggatatattaatatatttatttatgtttattt

SEQ ID NO: 7997 - DNA, 120 bp, synthetic construct; identical to SEQ ID NO: 7993
  source 1..120: mol_type = other DNA

SEQ ID NO: 7998 - DNA, 120 bp, synthetic construct; identical to SEQ ID NO: 7994
  source 1..120: mol_type = other DNA

SEQ ID NO: 7999 - DNA, 120 bp, synthetic construct; identical to SEQ ID NO: 7995
  source 1..120: mol_type = other DNA

SEQ ID NO: 8000 - DNA, 120 bp, synthetic construct; identical to SEQ ID NO: 7996
  source 1..120: mol_type = other DNA
